United States Patent Application Publication US 2012/0117685 A1 - sequence listing, part 6

SEQ ID NO: 12653 - DNA, 547 bp, Glycine max
  Coding DNA Sequence Number=SeqID_2874
acgttcgaccgcactgatgtgaacaaacacgtcgttgctgccatcgtccggctggatgaatccgaagcccttctggccattgaaccactttacggtacctgtcgtcattttcttctccaaagcgcacaagcgcattccgcgcgacattcacgcggctgtttcaacttcgtcgatgtctttggaaaaggagcccgcgggcacgatcaacaaggcacagcggctaatcgaatagagcgaacatatacattgttcgccccttttacaaggaaggctgccagtttgttttcagcccggcgatccagacgccggccgggagcagttccggatctgatctgccgggtcgggccagggcccttatcgattgacttggccggttgacttggccggttgacttgatcggttgacttggccgcgcgggggtggtcacctcgctgccactgagccgcgcatctccgtgacgggcaaatctgctcgttcgaaaccgacgaagacatccgcggttgctcccattctcccattcgcaacgagttccctgcgcaattggctg

SEQ ID NO: 12654 - DNA, 559 bp, Glycine max
  Coding DNA Sequence Number=SeqID_2875
ttgctctgaaaatctgactaccggtaggtacttagttattaaatttggaaatctgctcgagttggattgtgaatctgccataatggtagagctgccaatctcaagtgacccgactgtgatcaactctcaagctttccattaaatatcttcactacgtctctgtaaatagcttctcttaaatctgatacgtagccttcttaagcatctttaaatcgcattaaatcttcaaagcatcttatccttaaaatggatctatttggcgcctttttaaatcctttaaaagtgggcaaaatccgctagtgtctccaaaaaccgacaaaagttgttatcttcaaaaaagtacttgcatgtatccccgaaaaaacttgagcgtcaaaattttagttgcatcattggggtcttttcacaagcagtagcggcgcattctaatcctgaactgaaaaatcatcgtgcgtttgcattaaattcatgctctaatcattttaaattggagtcttcttacttaaatcattaagtagtctcttggccttaagcaacgccaagcgttgtgtatgtgact

SEQ ID NO: 12655 - DNA, 453 bp, Glycine max
  misc_feature (341)..(341): n is a, c, g, or t
  Coding DNA Sequence Number=SeqID_2876
gacctcaaatcatcacgcgttgtgacgagctcaggcgagctaagtggacgtggtgagcacaacataccgtccgtgcacgcgcgcatcgctcagtatattggcctcatctacgcgcactgcgcctctacaacacatatcgcctccacatttctagtttcgggcgtcgtggagctcacagaatgcagacagtgtaaccgacggaatcgcgcagctactggcgtcctagtctcacttctcaactccgtaaccacactctctcgtctggtgagtccattctcatcttccacaccatttagggctgagcagctttttgcgcatcatggagacagacatacggacanttgcgtgaccgtatactgtgacggatggcacagtcctcgccacgctatcacgtaagatgcagatgatcgcgcacccgcggctggggtgcgttgttggtaggtcgaacccaca

SEQ ID NO: 12656 - DNA, 557 bp, Glycine max
  misc_feature (160)..(160): n is a, c, g, or t
  misc_feature (172)..(172): n is a, c, g, or t
  misc_feature (333)..(333): n is a, c, g, or t
  misc_feature (342)..(342): n is a, c, g, or t
  misc_feature (371)..(371): n is a, c, g, or t
  misc_feature (402)..(402): n is a, c, g, or t
  Coding DNA Sequence Number=SeqID_2877
gacgcgttagctatatatctttatatgcgtaacatcgcgacagcaagtcgcacagcccgcacgcaggcacagcgagactaaaacgagagagaagatcgaactaaaatatcatagtacaacataatctcgataatcacaggaacgctcctgtgcgattganctgcgtcgttgnagtaagtgcgcacgcgtgccgcagcgcgggggcgccgggcgcgcgagcggatacaacgcgcgaagcaactatcttgctcttcagcccgtgtcaccgcactgggcgcgcggcctctcatgcgcgtatctaccatatctccgcctcacttactacacgcgtcngtgctgtcntctccgcgtgtgatgcggcgacgcgcccnaactccgctggagtaaatgacatgtgagagncaagaaacagtgtcatcatgatataagagaagatagatcaggtagagaaatactacgcacgcagtccgcacacaaacacactcccgaccctacctaacaagatcggcacgaacagcacaaacccactaccacactctaccgacagactaggcgaa

SEQ ID NO: 12657 - DNA, 386 bp, Glycine max
  Coding DNA Sequence Number=SeqID_2878
gggtaattttctgcgttaccatgcattcaagtaagagttttagtgtaataacagatagttttctcatctagaagacttgggggggcagtatgtactccttgaactaattggtcatgaaaggaggaccctgattgaagctgggtgggcaattatgtacttctggaactgcaatgatatttggagctactttaattaatctccaaaaaagataattagtagaatattgcaatgttttcacttattcagctctgtccctaagcatcagctttgctactcaaaagtcatgaaacaaagaaacgtcatcagagtatgaaacttcaattccgaagctaacatatagcattcggggtgctatatgcatgctcctagattgtgcgtcaaaatga

SEQ ID NO: 12658 - DNA, 413 bp, Glycine max
  Coding DNA Sequence Number=SeqID_2879
gagagactcctttgaacgttccatgtatagccgtcggtcaccaccaccgccttctgccagatatggccgcctctatgatgactattccagggactcatatgatgatcgcagaattggcctgcgaggggcgtcaccgcgccggttcacgccgtattaattactcgctcgggtaatgattggtgagcgagcggtaacggagcggtacgtatcaacagccgacgaccgttccatatgttgacgattacatcttattttatttaagaacctttattgatgtcacactgttggtgactgtcatcacgccatttaatttgtttactatagataatatgtataatgtagttgacgtacattaagtcaaatccgtgcggcttacaatgcattaaaagtcgtgctcggataactgttgtgtg

SEQ ID NO: 12659 - DNA, 369 bp, Glycine max
  Coding DNA Sequence Number=SeqID_2880
attctgatttggtttgacaacgaacttacaggctgtgcgttaacaaagcgagctaaatgcaccaaggcgactagttgtcttcatcccggaactccccttcatccctcccgcgtctcgattccccagcctgagcaaaccctccccacagcccgcgccatgggcggcgagatgcccggcaccgacggcaagggccaccccgccccggcctccgcctccgcctccggattcccgccgtcggcgccgccttatcatcagcagcagcaccaccagtacggcaccttcggggccccgtccgcgtccggcgagttcccgcagccggcggtcgggttcccccagcctgctccgccgcttgggttccagaactacccg

SEQ ID NO: 12660 - DNA, 593 bp, Glycine max
  misc_feature (304)..(304): n is a, c, g, or t
  misc_feature (393)..(393): n is a, c, g, or t
  Coding DNA Sequence Number=SeqID_2881
ctattatcttgtgcgttcctggttctgcgttcgcgtccatcgctctgcatactggctatgaggtaatgacaagagagtgattcggtgtggtggtctcgtgtcaaaccatatacatcgcatcctactcagtccgcctaataaataatcagacgcagggcgacgatgtgtctgatagaacgtgagtcagtgaagctattgttcgttagagagtgtttgtgggtccaagcgctcgcatttgtactgtcgaggcgagatgccatcgtggataggtaactgaggtacgacgatcaccagtacgacggantacgtgtggtatatctgttattgttgaatgatgtcagtgtcttagtgagctatgtacactacgataatcgtcatcaaataacatcttangctcgtggtgtctccgtgttgtgtgtcgtcttgtcttaagtcgattatcccatacaatccttgtacacggtactaatacgtaggatgaggtgctgtggtgaatttataacataatatattgtcttatgatagttcactctaaaaccattgcattgcttgtgggggtaggtttgtgttgatagtgacatacgtccgctctc

SEQ ID NO: 12661 - DNA, 578 bp, Glycine max
  misc_feature (26)..(26): n is a, c, g, or t
  misc_feature (51)..(51): n is a, c, g, or t
  misc_feature (53)..(53): n is a, c, g, or t
  misc_feature (74)..(74): n is a, c, g, or t
  misc_feature (78)..(78): n is a, c, g, or t
  misc_feature (91)..(91): n is a, c, g, or t
  misc_feature (94)..(94): n is a, c, g, or t
  misc_feature (111)..(111): n is a, c, g, or t
  misc_feature (136)..(136): n is a, c, g, or t
  misc_feature (166)..(166): n is a, c, g, or t
  misc_feature (192)..(192): n is a, c, g, or t
  misc_feature (215)..(215): n is a, c, g, or t
  misc_feature (217)..(217): n is a, c, g, or t
  misc_feature (233)..(233): n is a, c, g, or t
  misc_feature (236)..(236): n is a, c, g, or t
  misc_feature (250)..(250): n is a, c, g, or t
  misc_feature (252)..(252): n is a, c, g, or t
  misc_feature (255)..(255): n is a, c, g, or t
  misc_feature (312)..(312): n is a, c, g, or t
  misc_feature (314)..(314): n is a, c, g, or t
  misc_feature (337)..(337): n is a, c, g, or t
  misc_feature (345)..(345): n is a, c, g, or t
  misc_feature (354)..(355): n is a, c, g, or t
  misc_feature (357)..(357): n is a, c, g, or t
  misc_feature (381)..(381): n is a, c, g, or t
  misc_feature (409)..(409): n is a, c, g, or t
  misc_feature (419)..(419): n is a, c, g, or t
  misc_feature (422)..(422): n is a, c, g, or t
  misc_feature (434)..(434): n is a, c, g, or t
  misc_feature (456)..(456): n is a, c, g, or t
  misc_feature (463)..(463): n is a, c, g, or t
  misc_feature (495)..(495): n is a, c, g, or t
  misc_feature (507)..(507): n is a, c, g, or t
  misc_feature (521)..(521): n is a, c, g, or t
  misc_feature (526)..(526): n is a, c, g, or t
  misc_feature (544)..(544): n is a, c, g, or t
  Coding DNA Sequence Number=SeqID_2882
gtcatcatcgatgcgaacactcatgngcgctaccatctcctacgactcgancntcatcaactcgccatcactgntagntgacatatcgtanctngactatagtatacatgntctagactacatcatgtactgacgnactgctgcacgtcgcacatggacgatatanagtacgcgagacgatctacgagtcgntttacgtactgacgcgtcgcatngnctattataaacagacngantcagaccgacgacncnacntcgtccatcatctcacatatcatgactactacaccgtatcgtatgacgcagcgactngnatactcgcaacgtcgcttactcntgtactcngatcatacnncngtacatcacggagtcactgcctantgtcgtagtcaactacgatcacagctgntcgtccatancgncgtgacaagctnactaagcgacgtgatgcgactnatgccantatacgtgaatacatatgctgagactgcacgnatgctcgacgangcgggatgctcagnatganatcagacccgtccactgnagtgagctataagctcctctactagcatcagact

SEQ ID NO: 12662 - DNA, 558 bp, Glycine max
  Coding DNA Sequence Number=SeqID_2883
tcttcccttaaaccgcgttagatcgtcgtctatcttcacgttcactgtttcattcgtcttcatcttcgccggaaaatcattctcccaaggcttacgaccttccgatcatggcctacagtatcagtccagctcaccaccgactgaatctcactcacctcccggtatagtgatgtccttcttcggagattcccattctcctcctcctcagctcctcccaaaagcttcggaggcagacggcgacgatgactcgtggtggcgtgacgacggagccgcgaacagacatggtcatgtgatgaggcacgtgtttcttgcggcgagtatcatctgtggcgtttccggtgttgcgctgcttgtggttttcactttggtttacttctttaggtttcgcaaaaaatatccatcgaacttaccgtgtaacgatttaaggtagaaaattcgattttgatgtttttgaaatatgatttttttacacgaatttttttttatttttatttttaaaaaatataaagagcactttgctttattctgaagagttttatgttttgttgcacacccaca

SEQ ID NO: 12663 - DNA, 312 bp, Glycine max
  Coding DNA Sequence Number=SeqID_2884
tagggaattacttggcgtggcgaaagaaagatgtcgaagtaaggtggtgcctgcaaagtgcagagagtcgaagcacaagtgtactgtaaccgtagacgatgtgaaccaacctctctcttcactgattaccacgtggaactttcaaacgcttcctcataattcacgaactacacccatgaatgaaagaaacatcattgaacaacaacattaacatcaacaaacaaaactcatcttcctctttcatctctctctctctctcaaccccttttaagttttcttctcagaccctctctctcagattcttcaattttg

SEQ ID NO: 12664 - DNA, 410 bp, Glycine max
  misc_feature (53)..(53): n is a, c, g, or t
  misc_feature (145)..(145): n is a, c, g, or t
  Coding DNA Sequence Number=SeqID_2885
gatcgaggcagtgatcgccaggcacgaagccagcgcgagcgagcgcgtcgtcntggaggagagcaccgaggccgcggcgacggcgagcggcgtggcgcctggagccggaggcggggaggccactcggtcgccggccgcgacgatnaaggtggtggtggccgtggacgcgagcgaggagagcctgcacgcgctgtcgtgggcgctcgaccacgtcgtccggctccaccccggcgcgtccgtcgtcgtcgtccacgcccagcaccgcgtcgaccgctccgcctatgcaggcctggcctacgtcccgcccacggcgatggacgccatgaggaggacgcaggcggagaacaccaggaaggtggtgtcccgcgcgctggacgtctgcaagcagaagcaggcgagcgccacggcgg

SEQ ID NO: 12665 - DNA, 326 bp, Glycine max
  Coding DNA Sequence Number=SeqID_2886
atggtgtaggaacagatggctaatcaaaggccatagtgtaagatggatggagctgcaaaagagagtggcataacagaaggaatcatgagggaaatcctttagacaacacccaacattagtgactggagccaacgttcagattttctgagagaaagaagtaaagggctttgatgtggaagtgaaggaggcgaaactccacgatgagtactataagatagaccctctaaaggcctataaacagatagatgagaacactttctgtgtcaatgctatccttgaaacaatactaaaccgagaatttgaagacgtcgtattctgatatgaat

SEQ ID NO: 12666 - DNA, 410 bp, Glycine max
  Coding DNA Sequence Number=SeqID_2887
ggaagccatgctcgccagaaaacgtgtcacggctccctgctatgattttaccaccatctgcaagtccatcgtcgctggtggagtctccggaggagtatcactaactgaaaccgctccactggtgctgttgaagatgttgctatcagttcagatttcttacaccttggactacaatggaacaatgcaaggtctacatactttatggagaactgaccggtgttgtgggctgttcaattgtaatggtgctaattcggctcgagttgttccaaattctgctgtaaatgtcttaagatatgagctcgcatctcaggatgtactacattattagtatgagcaaacatggaacaagggagctcagctcactctctctcgttcgatgtggtctggatgcatttccagcatgattggga

SEQ ID NO: 12667 - DNA, 512 bp, Glycine max
  Coding DNA Sequence Number=SeqID_2888
ctctgactcagttctgtttggttctgttgggtcacgggcgccacgtgttccgaatcctccgccgaagcctacgtcttcttcttcgccgtcgtcaccgtcgagcgtttcctccggcgaaacagagcgaaggattccgccaccgccacctcctccgccgaggaagcctgcgtcgaatgcggcggcggcacctcctccaccgccgcctccgcctccggcgaaggcggtaagagtggctccggcgaaggtgcggagagtgccggaggtggtggagtttgtaccactccctgtgccggggggacttgcatgcccagtgagactatgtctccggtgcagatatgccggcgacggggaacggtcgtgacatgatctgccagatcgagaacggatcgagttactggttgctatagagacacatgtggaaccgcgcggagatctgatagatcgtgatcaaggagctgggtagagctgattacggtcgtgtgaagtgtgggcgtttgtcatatgcgttgcga

SEQ ID NO: 12668 - DNA, 592 bp, Glycine max
  misc_feature (200)..(200): n is a, c, g, or t
  misc_feature (228)..(228): n is a, c, g, or t
  misc_feature (270)..(270): n is a, c, g, or t
  Coding DNA Sequence Number=SeqID_2889
actagcggtcgttcgtagatcgacgctgatcgcagcacgcttgttctagcgatatgtagtgaagttagtgcgcggagatgattagtatgtagtgtgtggcgtgagctcagtgtagcgtgttgacactagcacgtatgtcattagatctgctgtgtcgtgggctcgatgtagtatatgttacatgatctaggtatatgcgntgagatggtgtagtctcagtgcgtgtgngcacgatgtcgttattatacagtgatacggcgacagtgtatnagatgagcgagaagtgctagcgcaacacactaacaccacaccactcacacgctggtcacgagaggcgtcgtaacaatatagcagccgcgcgcatgatgtgtgtagcgcggtcgaagatcggagtgttatgtgagaggacggtagtatatggatcggcagggagaggatgagcagccgtgacgtgcctcgccgacacgagatcagcgatggcagcgactggtcgaagtctgtgggtcgagggtagagtggtaggttataacattactggcgttcggtaataatgtaaataaccgacacagctagccgttctgcggagagccag

SEQ ID NO: 12669 - DNA, 478 bp, Glycine max
  misc_feature (319)..(319): n is a, c, g, or t
  misc_feature (346)..(346): n is a, c, g, or t
  misc_feature (431)..(431): n is a, c, g, or t
  Coding DNA Sequence Number=SeqID_2890
ctgccacaagcaagattcgataaagtcttaattcacaccaccaatgtgatactagcgcactagcccaaacacgtgtctctaatgtcgctccaacgtactctgtccgctctaccctgcgcgctctccttctctcgcacacataacagaaacacctatttacctactcaccccgcctactcccactttctctcctgtgctcttcctgcgcgggccgctgcactacaggtcgcgccgcgccgcccaccgcgtggtgcctgcatctttcattctccggtgggcgcacactatatcgcgcgtgcgcgactacatatcacaaatntccatgctgcgacaactgctatacaantaccgtatcactgctttctcactcgctatattctcccatataataagacttgcatacgctgctcacatagcactcgtctcctctnatcggtcgagcagaaaagagaaaatatagacgcgctgttgctgcggc

SEQ ID NO: 12670 - DNA, 136 bp, Glycine max
  Coding DNA Sequence Number=SeqID_2891
gactccgagggtgagtttgaaagctcaatgcttcaaagcaaaagcttgaaggtactaaacatttgaatcggctgaacaagccttctggtaaaaccattcaaaggccaaatggggataccataaactggggacctgg

SEQ ID NO: 12671 - DNA, 561 bp, Glycine max
  Coding DNA Sequence Number=SeqID_2892
ggactgtacgtgaacctgatgaaagagtgcttaacctcaaaaaggataatgttgatgtaactctatcgataaaagaaagaaagttctttacgagaaaagttttgatgaatgtgacaagtgaaatgaagggaaacacattttttgttaacgcgacttctatttatttggacgctcaagaaaatgggatcgtccaggtgaacgggacggtagatcaaaaaccgctgaatgagactggacgaatttcaataaactggaaacgtttgaaagaaactgggataatggaaaagggaaaattcaaccaaatttatgtgaccgttctaagcaaggtacccgaaaatgaagggagcaaaccgactatcaaagtttctggattggaagaacttgtcaagcatgtgacggatgaagatattgcagaagcactaaacagtcagatgatgaaaaagcggcagatgcaagaagacaaatttgatgagttagattctgattcaattccaagattagcatctgaaaaatcatataataagcatctcttcataggttcattcccaacatttgatttga

SEQ ID NO: 12672 - DNA, 541 bp, Glycine max
  misc_feature (41)..(41): n is a, c, g, or t
  misc_feature (64)..(64): n is a, c, g, or t
  misc_feature (241)..(241): n is a, c, g, or t
  misc_feature (364)..(364): n is a, c, g, or t
  misc_feature (370)..(370): n is a, c, g, or t
  Coding DNA Sequence Number=SeqID_2893
ccaggcagagcgagcggagactaccgccggaggagcggaancgaaagcgagcgcgaagaacacncagcacagcccgaccacacaccaccgcggcgcggcgggaagcgcggcgagccacgcgcgcgccgagggcacacggagggacaagccggcgaacgcagcggcgcaccacaccaggctcgggcgagaggagaaggacgggaaaggcgacggccacgcacgcggcgcgccagaggaacgnaagagaaaagcggcgccgaaacacaaccgcagcgcaacaaaacagcacacgccgaccccacacgaggctgaccgcacatcgacagcgcacgcgccagcgacagaaacagcagagacgaagggncaggcncaacgcggcccgcaacgagaagcgagcacgcgccggaagaagtacgaagcaacaggctcagccccacgggcaaggggaagttgagaagccggaggagcagagcgccagtgacgagccaagaaatagcagcagcggcagcggagacaaagtcgccaagagcgagacgcgcag

SEQ ID NO: 12673 - DNA, 157 bp, Glycine max
  Coding DNA Sequence Number=SeqID_2894
gtaactcagtttgaagttctcaagactagcaattctctacgtaacacagcatgttctctatgactttctgctcagatgatttagctagctactagctactcattcaatttcatgctataattaatctcattctaaatcatctatgtatttggagacg

SEQ ID NO: 12674 - DNA, 521 bp, Glycine max
  misc_feature (402)..(402): n is a, c, g, or t
  misc_feature (496)..(496): n is a, c, g, or t
  Coding DNA Sequence Number=SeqID_2895
ggtgattgtcagcatgtctatttgttagttctagcgaattcctcagtccactattatccagtcgcacatagatggaggactcgctgcgagaatatctcagatacatcagagagagcagcaatactaacgatgaggacatatcttacgattgagttcaacgctgtgcgcatcatcgcagtatctgttatctaagagttatgaatttactaccagcgccgagcaagccagtgctacctcagatgtgcggtctatatacaacaagtaacacaactcgagaataatgatgtactcggtaggtaggcggccgattgatcttgctataattgtcagaagaggtgaacatctctatgtcaaccattcttccctcctacgtatatgctgaggtcgcttgatacgatctgnctctacgccctctgcaatgtcattcgctcgagtacgattatatggagagacatactataatccgatatgctgaagtgacgcgttatcgctcttngaactcgctatatgctctatcaacg

SEQ ID NO: 12675 - DNA, 491 bp, Glycine max
  misc_feature (56)..(56): n is a, c, g, or t
  misc_feature (239)..(239): n is a, c, g, or t
  misc_feature (338)..(338): n is a, c, g, or t
  misc_feature (376)..(376): n is a, c, g, or t
  Coding DNA Sequence Number=SeqID_2896
tccattttttgctttgaatccataatatggtatatttatacttgctttaacattgnatttatttatttattatttattaaggaatcgataagaaattttgtttgtaaatactttgtttttccctaatagagatacaatagaatttaatcattctcacgagcttcctcataaacgtagccccgacaattcacagctccacagagacagacaagaacatctgtattctttaaatcttttanaggagcacagttgtagtcaattgttaactcttcgccaggctgaatatctctcagagcaaaaaagatgattcgtgggagcagcatatccctattctctgngtgaacagctaaagcaaccatatttggccaacagctgngattaacaaatcttgaatggttcccataaaaaaatgcatcgatcacaagaggaaaatttgcagcaatatcctttaattttttcatcttacgagtctcgcaaactccatcgatatt

SEQ ID NO: 12676 - DNA, 391 bp, Glycine max
  Coding DNA Sequence Number=SeqID_2897
gcttgggagatctattctaccgtttagtgtctcagaagttcgaagatccagcagaaggggaggctgcgctagtggcgaaattcaagaaactgtacgaggatctcagtgctggattccgtgccttggaggatgaaactcggtaagctgtcaagaaccacaaagtcctccgacttgcgggttgtatgggagaaagagtatctcatgttctcttttgtttttgagccaacaactatcatatagtggtcggtatttatttatccggtttgttccatcagtcgagtttagctctgtgaacgtcatatgattctccccggctgtgctgtgtaatatgtttgattcgttgtttttttctttggatggtaataaggtacagccaaagtgagtcttctat

SEQ ID NO: 12677 - DNA, 585 bp, Glycine max
  Coding DNA Sequence Number=SeqID_2898
atcagtagcatctctatgtttatagatacatactaggaacatgcttatttagtgtggccttctcttttttatgcaagaagtgtgccttctctaatctgacaatcatcttatttgttgttctaaataattactgcaggatggagcagcaggcatagatgaaatctactgcaaatttctattggttgcggcatcttccgctgagtatgaagacttgaagagtggtcataatgttacttaaaggaggcctcaacttgcaccaaatgcatgggcatgtgcaacagcaacttatgtaggtttctaaaaaccaataaatgctgctctcaaatcagttaggaggctgaaggtagtagcttactgaactctcatttctggaaaaatctggagatgtcttgtttgtacaatctctaaagatggtgctccattgttctgttaatcaagatttgttccctcctttcttactagctgatacgtgatgaccgtttgcatggggtttatgttaactatattctattcatgattcaaactgtttgttgggtaatttagtttagacattgtgtcctgagaatcttgatatctagctgtatt

SEQ ID NO: 12678 - DNA, 525 bp, Glycine max
  misc_feature (80)..(80): n is a, c, g, or t
  misc_feature (84)..(84): n is a, c, g, or t
  misc_feature (113)..(113): n is a, c, g, or t
  misc_feature (216)..(216): n is a, c, g, or t
  misc_feature (227)..(227): n is a, c, g, or t
  misc_feature (244)..(244): n is a, c, g, or t
  misc_feature (247)..(247): n is a, c, g, or t
  misc_feature (250)..(250): n is a, c, g, or t
  misc_feature (374)..(374): n is a, c, g, or t
  misc_feature (378)..(378): n is a, c, g, or t
  misc_feature (423)..(423): n is a, c, g, or t
  misc_feature (446)..(446): n is a, c, g, or t
  misc_feature (485)..(485): n is a, c, g, or t
  Coding DNA Sequence Number=SeqID_2899
aacatatgtgctccgattttgcgaatggaggacgacctctaaatcggcactagtcacgcgctgcgacgcaaggatgcgtnctangctcgtgcgctaacatgctgcttgactantgagtacgaccatatagagtatagagtgacatcagggtacaagatatatactaagacgatgctctgcgtgcgcgagtgcgtacaagagtagtagacgtgtcantttacgagatngtactatgtagtgacanatntanctcgcagtatgcgtttacctcccagtatgcgaggagagtcgagcgacagaagtgcgtggagcagggactggatcctgtgtgtagtcttgagcgcgtcccccactagtgagcatcgcgagatacntaanagagcgatatggaatcagatcacatgtctcttgcctacgccgcgncgtgggtgagtattctacaagcntatatatacgtagggagtggcgggccacagacgcaagcncgagcggggtgtgatggatccccgatagtattatttagag

SEQ ID NO: 12679 - DNA, 595 bp, Glycine max
  Coding DNA Sequence Number=SeqID_2900
gagtacacggtatacgctatcacaattataattaattcttaagttctttagatcacggccgctttgattcggcgtgcgacgtagatagagaaacgggaagttgtaaagagagattggcatgtgttggcgttggtagccaccggcgcgccccaccacaccgccggcgttcgtgttaacgcggcgagagatagtaagagagggatcggcgacaatgacgaggagaatataataaaagaaaagggggagattaaagccggattatatataattctattggaggattcgtactatgcggcgccgcgcggtgtgcacagataaaatatgcttaatgtgcgggcaaaagaatctgtggggtgagacactgtgttgagataaaccgtagtgtgtggcgaaactactttcattagtgattggtgtggtcgtggatcgttataacagttccctctcgacaacacaatgggtcgggagaggaaggcaactaatatcaaaaatatggataaacacaaacgaaagaacaggcgattcaaaatatgtaacggaagaagagtggggggagcgatgtaacggcgcgcacaaatataccatcgctagctat

SEQ ID NO: 12680 - DNA, 419 bp, Glycine max
  Coding DNA Sequence Number=SeqID_2901
tcacaagttagtcaccaaaaaaccaaaaagaaaaaaacaaaaaggaaattcaatggctgcctcgacaatggctctctcctcctctgccttcgccggaaaggccgtgaacctttctccagcggcatcagaagtcctcggaagtggccgtgtgacaatgaggaagaccgtggccaagccaaagggaccatcaggcagcccatggtacggagccgagagagtcaagtacttgggtccattctccggcgagccaccgagctaccttaccggagagttcccaggagactacgggtgggacacagccggtctctcagccgatcccgagacattcgcaaggaaccgtgagctagaagttatccactgcaggtgggccatgctcggagccctaggctgcgtcttcccggagttgctggccaggaatg

SEQ ID NO: 12681 - DNA, 594 bp, Glycine max
  misc_feature (221)..(221): n is a, c, g, or t
  misc_feature (412)..(412): n is a, c, g, or t
  Coding DNA Sequence Number=SeqID_2902
agtgatactcgtatctgtcaccgcagttccagtccaaatataatcgcatatatccttcccctccgtgatagaacacaatctcctttatctatatcacgtcttggtgacaatattgtgaggatctgtatgcaactgctcttatactacgcggtcttacgcagcctgacagagattctcaaaatagtgatacgaagccgaagaatagctaccgaatatactanttattcattactctctcttatatacatatgtaagtgcgagcctttattgtatccacgtaattgccgtgatgtatatatcgcatactctcatatcgatagactctatcggaaaacaatttcatagagagctccttatgtggcgcatcgcactccacaacactgtaccggaacacacgatcatctacatcgtncgttgtacgaatgactgtgtatcctataatggcctcattaactcctatcctttctatgatttagtcgacggttggcgcatctgatacgcgtacagcatgatgttatctgacgtgactcacatcaatgaaagtatcttaatataaagtctctctcgtctgatgctcctatacttatgctcgac

SEQ ID NO: 12682 - DNA, 134 bp, Glycine max
  Coding DNA Sequence Number=SeqID_2903
aattcggcaccagcgttgctcgtgttccttgtcaagagatccttttgcttgaggcgtgaatggaaagaggaatgggatgactcagtgtggttgtcacctgaagaaggccattgacatagctgtgaggagatgga

SEQ ID NO: 12683 - DNA, 470 bp, Glycine max
  Coding DNA Sequence Number=SeqID_2904
aaatggcagcgaagatctcccagcttgcgtgtttctcctccaccaaccgccaattccacttctagaaccgatcgtttccaagccttaggttccgtcccgagtcttttgtagttagaagcgttgttgatgggaacagctcggaaacaccagcttctctgagatatgcagctgaggtttcgaaacctttcgttgagaaaacatctacagtggatgaaactactacgggtaaagaggttatcacagagtcggtagaggaacatgctcgcgtcatcacagtgtaaaagagcagagaagattcatgactctctgctttcgcattccttatggtggcctggctcatgagcggaggattgccccgaatgtgtgattgcaccccacacttacagcggctaagaaatcgcgtggtctctgacggggggtggacctcctgaaccccaaaatgaacgagaacacataaaccaccacggcgg

SEQ ID NO: 12684 - DNA, 539 bp, Glycine max
  misc_feature (323)..(323): n is a, c, g, or t
  misc_feature (426)..(426): n is a, c, g, or t
  Coding DNA Sequence Number=SeqID_2905
ttccatcaagtatgtccccatatgcagtaactggcttaatctaataatagtcaactttatataatttcatcttttttattatgtagatggaaggctttcgggtttttgttccagaagaatgggagggatctggaatggatgccacattatttgcagcaacagacttaaagcaatgccttgagggtctagcacgccatttatttggtgctgtggaaatgcgctgggtggatacttatttcccatttactaatccatcatttgaacttgaaatttatttcaaggaaaagtggttggaagttttggggtgtggagtgacagagccngagattctgaagagaaatgggaaacctaataaggttgcttgggcttttggcctagggttggagaggttagctttggttctatttgacatacctgatattcgtntcttttggtcaaatgatgagcgatttacctctccagtttccaagggtcagcttgggagtcaaatttaagccctttccagaagcttcctcctggtacaaggacatgagtctctg

SEQ ID NO: 12685 - DNA, 583 bp, Glycine max
  misc_feature (76)..(76): n is a, c, g, or t
  misc_feature (138)..(138): n is a, c, g, or t
  misc_feature (142)..(142): n is a, c, g, or t
  misc_feature (147)..(147): n is a, c, g, or t
  misc_feature (160)..(160): n is a, c, g, or t
  misc_feature (171)..(171): n is a, c, g, or t
  misc_feature (195)..(195): n is a, c, g, or t
  misc_feature (215)..(215): n is a, c, g, or t
  misc_feature (235)..(235): n is a, c, g, or t
  misc_feature (250)..(250): n is a, c, g, or t
  misc_feature (252)..(252): n is a, c, g, or t
  misc_feature (270)..(270): n is a, c, g, or t
  misc_feature (276)..(276): n is a, c, g, or t
  misc_feature (281)..(281): n is a, c, g, or t
  misc_feature (303)..(303): n is a, c, g, or t
  misc_feature (319)..(319): n is a, c, g, or t
  misc_feature (341)..(341): n is a, c, g, or t
  misc_feature (369)..(369): n is a, c, g, or t
  misc_feature (385)..(385): n is a, c, g, or t
  misc_feature (419)..(419): n is a, c, g, or t
  misc_feature (425)..(425): n is a, c, g, or t
  misc_feature (427)..(427): n is a, c, g, or t
  misc_feature (433)..(433): n is a, c, g, or t
  misc_feature (487)..(487): n is a, c, g, or t
  misc_feature (517)..(517): n is a, c, g, or t
  misc_feature (529)..(529): n is a, c, g, or t
  misc_feature (537)..(537): n is a, c, g, or t
  misc_feature (554)..(554): n is a, c, g, or t
  misc_feature (557)..(557): n is a, c, g, or t
  Coding DNA Sequence Number=SeqID_2906
ttcactcgaataccgtacatccacgctcacactctacacttctcattctcacagtactaccttatcccccactcanacagtgcactagtactatcaatatatcatctcactaaatctctctctctactatcttctcanatancgtanagcagaaatctgngacagatttgntagctctctctctctatattcccnactcgtactactagtatgancacaaaagcttattctaccntcactattattgacntngactatattatgatttanctatantatcngcatatcgatatccattctgtntcgtacctttatctantctagttctccatcatcacttncgtatatacatgtccccttcatgacganactcagtactatatgngtgcggaacattatgacgtgatgactcgactagngaagangncgacanagccgcaccaggctgcgcagtacactacgtacgcattacaccagcgtatgtgtntatcatagtatagtcactacttcacacgangtcgttactatnatgctganttcttcacgtaatcttngtnagcttttgaagtcctcattacctatt

SEQ ID NO: 12686 - DNA, 455 bp, Glycine max
  misc_feature (174)..(174): n is a, c, g, or t
  misc_feature (404)..(404): n is a, c, g, or t
  Coding DNA Sequence Number=SeqID_2907
gatcatacctcatgtggagcacgtatctacaacgaggcgcatcctcagaaagagaacgctaatatcagatcatgacgctcagtgtgcttgctcgctttgttagacacgcagaagttgagttacatgccatgtaggggacggcatcatctaacatatcccgccctcgggcagctntttacccggtgcgtcatggtaagtactatactctcttcattagccgactacagctcaccttcactgcttctcatgtgtttatggtcgtgtagctagttgtctttgacgtaggtcgcgttacatgccggtgctgctaagacgatagtgtcgctgacacatcagtagggtatatatggtgatttagacacctgcacatatctcgctctgtgcgcagcggccccgacatctcncagacgactcatccactagattgtccgccttcctcttctacgaagtaacaa

SEQ ID NO: 12687 - DNA, 324 bp, Glycine max
  Coding DNA Sequence Number=SeqID_2908
aaaaaatgtttccttgatgtacagcaacaaaaacagacaagcccccccggggagcatacatttccccactacaagggcccccccctataaattgaactttcaacaaatctaaaaaaaccctacataccccccctcatggcccaaaaaaaaaatgggggcaaaaaaaacccccaaggaatgatcccccagcagtttaaaatttaaaaaatcccccaatgtcagtaaaaacccctaaggggacccttacaaaggcggaaactccaaaaaccaaaaaccccttggcccgatttgaggaacccttccaaatggaaggcccccttctga

SEQ ID NO: 12688 - DNA, 515 bp, Glycine max
  misc_feature (42)..(42): n is a, c, g, or t
  misc_feature (71)..(71): n is a, c, g, or t
  misc_feature (77)..(77): n is a, c, g, or t
  misc_feature (115)..(115): n is a, c, g, or t
  misc_feature (233)..(233): n is a, c, g, or t
  misc_feature (442)..(442): n is a, c, g, or t
  Coding DNA Sequence Number=SeqID_2909
gctcgtgtggtctattgctctatcatgtccgtctatccgcgngtctagagaactggacgatacattgacgntcgccncaagaccgcatatcatcaatcatcgacaacaccactantcgcatggcagtcgagcgctacatcgcgcgtcgacggagcgtgcgcctctcgtaccgcttgctggctatcagtcactctcaggttcgtcatcaccagtcatcgtcatcgtcgcgtgtntgcagcgtagatagcgcaccaatatcgtaactagcacgcacgcgcatcgcacagatggcacgactctgcttcgtcgttcgcgtaggagtcagatacaagtcagcagatagatagagcgccagcggtagtatatataggatagaggtaagcactcgactgcggccgtttgttctctggtgagagatgcacgctctatatgtcgtcgcggncaggtggagctctacttggtgcaatacatctacgcatgatgtggggcggatagatctgcgctcgtccatgaca

SEQ ID NO: 12689 - DNA, 375 bp, Glycine max
  Coding DNA Sequence Number=SeqID_2910
caagctggagctatctatctatggatgtaccagaattacagcaccagacaatagcgtttctatgggccttactaaatggagatgatattaaatatagagttaagctcagaagggagataaaattctttattttgagatttaatgagtataaggatcattggaaaaatcagacactggagctgtttgtggcgtttctagcgagtgtgttgtttcatcaggggaaagtgatgtttgaagggttacaagaaagtgagaaagaggaggtaagagggtgtaaggagtatttggaggatcataagactacgctgtcggataaagggaagtattttgcggaaagaataacgagtttcttggaaccgttgcttctggagagaa

SEQ ID NO: 12690 - DNA, 160 bp, Glycine max
  misc_feature (100)..(100): n is a, c, g, or t
  misc_feature (127)..(127): n is a, c, g, or t
  Coding DNA Sequence Number=SeqID_2911
acatattcctacgagcagtttccaaacggaagcgttttacacaactccgcgacggcccggcgtgcacgtgcgttacaaagtttcagggtcgcggaagggncgagaagaaacctgtgtaagaaagcgnacacactattggcgcataacctacgctgcctaa

SEQ ID NO: 12691 - DNA, 501 bp, Glycine max
  misc_feature (333)..(333): n is a, c, g, or t
  misc_feature (335)..(335): n is a, c, g, or t
  Coding DNA Sequence Number=SeqID_2912
gaggctagagtaataacgagtcacaatcacgatcattactatcgccgatcactcatcctactctcgacgcctagcaaccatcaccacaacaccctcacgcgcccactacctcacgtcttcgatcgcgacgcggctgagcgtgtgtgtctcattcggatatataatatgcgctcagcacctgtcgcctactctcaccaatactcgcatggagtgatctatcaccacgacagagacattcaattcatatatctgctatgtgatacaactctcacgacgtccgaaatgaaacggtgatcacggcatcaacacacgatccgtcacaacatacaacananaatattcatataactacatcaagtaaggagacaccgttacatctcatcacacattcgtgtcatatactttcgtaatgcgacactccaccaccaccttctgctattggtgcagcctagacatcaacgatattggcagagttcgcaccgaatataccgaggacgaccg

SEQ ID NO: 12692 - DNA, 328 bp, Glycine max
  misc_feature (33)..(33): n is a, c, g, or t
  misc_feature (107)..(107): n is a, c, g, or t
  misc_feature (120)..(120): n is a, c, g, or t
  misc_feature (125)..(125): n is a, c, g, or t
  misc_feature (133)..(134): n is a, c, g, or t
  misc_feature (140)..(140): n is a, c, g, or t
  misc_feature (199)..(199): n is a, c, g, or t
  misc_feature (225)..(225): n is a, c, g, or t
  misc_feature (236)..(236): n is a, c, g, or t
  misc_feature (269)..(269): n is a, c, g, or t
  misc_feature (279)..(279): n is a, c, g, or t
  Coding DNA Sequence Number=SeqID_2913
tcgcacgatgacacgaccgtcgctgcgcgacgncagtcccgcgctcatgagaatacacgtcgcatcgcgcacgtgcgatctgcactcgcgcgtccacgcgcatcggntgcgcgccgcacncacgncgcgcacnncgccgncgacgacgcgcgtcattgagtcgctcgcgtgcgcgtagcgtcgcagacatgtcagcganagtctctcgttcgcgcgcgtcctcgncagactgctgncgaggtgaggtgcgatgcgcgcacgggacgacncacgaccccntgactcgagatgcgcgcacccgacagctgctacggcatcgcacatcgac

SEQ ID NO: 12693 - DNA, 360 bp, Glycine max
  Coding DNA Sequence Number=SeqID_2914
acacgacaataaaaactcttctcaagttcatattgagcgcccgacacttttctaccacacaatcccaccacccacacacgagcgggacgtagggcgggcgccttcctaattatggcacacggtgactaatcaccacctccgctctcttccccgcccaacctctctctctctctcttgtgggtgggacactttttttatcttcatattcacttttcgctagtcttctagtgaggcggagtatccctctctacgctactaccacgaaactacaccaatctgggcaacagatctatcatatcgattccactcacacatcggggctctaatcccgaccaaactctacgtacaaatacaccgcca

SEQ ID NO: 12694 - DNA, 582 bp, Glycine max
  misc_feature (147)..(147): n is a, c, g, or t
  misc_feature (197)..(197): n is a, c, g, or t
  misc_feature (270)..(270): n is a, c, g, or t
  misc_feature (339)..(339): n is a, c, g, or t
  misc_feature (374)..(374): n is a, c, g, or t
  misc_feature (429)..(429): n is a, c, g, or t
  misc_feature (446)..(446): n is a, c, g, or t
  misc_feature (448)..(448): n is a, c, g, or t
  misc_feature (525)..(525): n is a, c, g, or t
  Coding DNA Sequence Number=SeqID_2915
gcatgatggcatcactactgtgtcaagatcccagcgcacggtaggtctggctgtgatagctcagcagatgaatctgatgataagacatctctctcgctgagcggactatgacgcatagtgtacacacttcgcgtgtacagacagcgnagcacagactgatacactctgcagagtcactgatccgcactactaccganacctcgattcgtgctcagaagcgtgactattaccagagatccacaaggacatcggcgagtgatgataacgagnagtctgcactcgctgacagtgcgtgtacggcagtacatatcggttcgtgcatgagctctagacacacgnatactatctgtcgcgcgagacgtcacacttccatngatactatcgctcacgcctcgactacagtacgtgtcgcgcgtgactacagcactnctctagcatctatcagngnagcgagatagtggcgacgtaggtcgcgcagcgtgctgtgatagcacctacgtcgtggagatggcaagcctcgcactnctgttactcaactagtcgtcgtacgtccacgtcgtccatcatcacaccgttatagta

SEQ ID NO: 12695 - DNA, 513 bp, Glycine max
  Coding DNA Sequence Number=SeqID_2916
cgcgggctccccataatgtaaaattgtgttccaccccgccttctggggatccaaagaaaccattggggcccacataggttccctcctttataaacgggcgcttggcggtccctcaatcaagtggggacggcacttgtttatgggccccccaggggctactgattttatccccccgaccttaaatttggggggattttagggggaaaaatgctttccccgggaaccaccgggccccaagttttcccgaatttttaacgggtcccaatttagggcaagaaggtgccccgcccaaacccggcccgaatcaattatcccgggcgaaaatagggaagaggcggggggcccccccgttacggtcccggtatttttttttttttttttttttttttttttttttttttttttttttttttttttttttttttttttttttttttttttttttttttttttttttttttttttttttatcattacacaactaatatgttaatctttgttatcgtgagtgta

SEQ ID NO: 12696 - DNA, 125 bp, Glycine max
  Coding DNA Sequence Number=SeqID_2917
attcatacgatttacttacctagctggctagcttattctctcaactgcatatgttcttgcattactggtttgtttaaatcaatttattttttctaacacatctcaggaatgccagcacacaaacc

SEQ ID NO: 12697 - DNA, 253 bp, Glycine max
  Coding DNA Sequence Number=SeqID_2918
ttcggtgggctggtacctctgtgtccgtgagtgctatggagacaggaacctactgtctggtggatgaatcatgaccgtgtgatcatgagcgtgattaacggcccgggtgagtttctctttggagtagtctcatctttggctgttgaggatcgttcttaggacacttccatgtgcctgggaatgggcatacgcggtgtctgacagaccttatgtgaatctaagacctaacagtatttgcgctggtggaggcgac

SEQ ID NO: 12698 - DNA, 571 bp, Glycine max
  misc_feature (299)..(299): n is a, c, g, or t
  misc_feature (409)..(409): n is a, c, g, or t
  misc_feature (502)..(502): n is a, c, g, or t
  misc_feature (508)..(508): n is a, c, g, or t
  Coding DNA Sequence Number=SeqID_2919
agatcgtattatttcccgctattgcatatcccctttcccgggcacgttccgttaatctccctcgacattttcttattgccactcctgtttataccattttttcattgggttctgttactccactctatcaactaaccgcacactcgcctatgttctttacttactttcgaatctacggccacacatagagttgatctacatatattattattacttctgcatataatatgtcttatggctgtgagcgttacagataatatagtatgataacatctagagcgatcgtagttagataagangcgacgcgctgtgtcgatgatagcgagacaacacaccacacgtcttggatagatgtgtccgctcggcgatgaagtccttagtggtattacacgtatgtaggacgcttggnggaagaactaatatgcgcgtccgcagcacgtgtgtgtatagtaatattttttactgatgtggcgggatgtattgacgcctcaaccaccgaccncaactnctgacatcgcgataaaatatacatcagtcgtctgagatatgcatatccgcagacgctgtatat

SEQ ID NO: 12699 - DNA, 530 bp, Glycine max
  misc_feature (140)..(140): n is a, c, g, or t
  misc_feature (233)..(233): n is a, c, g, or t
  misc_feature (277)..(277): n is a, c, g, or t
  misc_feature (301)..(301): n is a, c, g, or t
  misc_feature (342)..(342): n is a, c, g, or t
  misc_feature (355)..(355): n is a, c, g, or t
  misc_feature (362)..(362): n is a, c, g, or t
  misc_feature (365)..(365): n is a, c, g, or t
  misc_feature (481)..(481): n is a, c, g, or t
  Coding DNA Sequence Number=SeqID_2920
gtgctcatggctcatcagagtgctatactcgtgctcttcgacgcctgactacatacgtgtatatctagcatgctctgatcgcgcgcaacacacagagtgacactatatatcatgagtcaacatacgcgaacggtatatanttgataagcgaacatcgagaagatacggaataccacaccatgctgagtctcagtgacatgtctagtgaatcaaccgtcgagaccagatagtgncactcactatgctcactcatgctgtgacgtagggtgcttatatncactaatatctgacaacgtcaaancgtgatcgcgcatctagtcacagtgcatgtatagatcacantcgtctcaatganctcgtantcntcatatctagagctgtctctttatctctgttgatgtctcatatatcgaagtgtatcatgtacactatactctgcaggcctactagatgagctgtcagtatgcatgtctctcatcantcatatcatgactggatcactagatagctcaaactgtgacgtactacgt

SEQ ID NO: 12700 - DNA, 598 bp, Glycine max
  misc_feature (198)..(198): n is a, c, g, or t
  misc_feature (348)..(348): n is a, c, g, or t
  misc_feature (361)..(361): n is a, c, g, or t
  misc_feature (421)..(421): n is a, c, g, or t
  misc_feature (524)..(524): n is a, c, g, or t
  misc_feature (530)..(530): n is a, c, g, or t
  Coding DNA Sequence Number=SeqID_2921
ggcgtcgtctctcatataatgctactgccatgttctccacttctatatacgatgtaagatctatcatacaccgccgacgataggaacacacataaacacatatagtatcgagcagacgtcgctcttctccactcttatttgcgcgcactgacataacgtctacgtgtacatacacacctctcgttagtgttcatatcntcctgcgcacttccactcatcgtgctcctcggtgtacgtgtttaaccgcatctcatactcattctatataagagtctacgtcaattatcatggctagctgtgtataaatatagtgcatgatgatacattactagatgctcacacatgccncgtttataagatncgatctacactcaagatcatcgcccttaaccacaacagagagtggctgttatgtgatgcncacgtgagactcatatctcaccttcactacctatgattattatatgcatcataatacagtatatatgctaaatatatgatatactactatactcttgatgtcnatccantctgatctatattgtctaccctcctctctcttctgcgtactgtatcgtagccgactatctgtgctgta

SEQ ID NO: 12701 - DNA, 448 bp, Glycine max
  misc_feature (200)..(200): n is a, c, g, or t
  misc_feature (422)..(422): n is a, c, g, or t
  Coding DNA Sequence Number=SeqID_2922
ttatagcgacgtgtactggaatgtattgtattatgtagaatagatggtagcgctccatgatatcatatatagaatgatagtgtgtgtgttgttcgtaatagtaagaagaatatagattatatattatgatggattataatcatgtcttgtgtaaagttaaggtcttgtgcagtgtcagcacgacatatcgactatgctantatcatagaacaagagatactgtataagagacatcgctacacacaaagaacatacatagacatgcgtgcgtgctgccggtgtgctgtataccgtcgggtgtcgaatcgatggccgtcttgagaagggaccgtctcgtagcgaaatgagcgatatatcatcgtcgtcagtatgtgtatcaccgggaaccttcataatgtacagatcgacgaccacggggagcncatgtctcacgctgcgtatgacccag

SEQ ID NO: 12702 - DNA, 530 bp, Glycine max
  Coding DNA Sequence Number=SeqID_2923
ttgtgtggaggcaagtttgttttattgttgttattattattattacttgtttggttatcacatattatttttgttttaaattgaatatatatatattcttgtaaataaactgaacaaatacgtccatatagtcgactgttgtaaagtgtaaactaatcaaataccttctgatgtcactttttacggctcaaaagtacatgtgtttagaatggcgggaaaaaaaaaccttgttaagtgttatattaacaaagtacttgaagcttcttatttttaatgaaaagtgattaatttatattgtgatatggaataaaatattcagaaatattcatcaaacttttttttttggtgaatcagagatattcatcatttgttccttgtggtaactggctaactggattcgtgaactatggtcaataaatagactaaactgcaagctgtagtggtcaaagtttcatgattatcatatcaatagtttatttgtaactacttaatatctttatgaaaagataatcactttggaatgtttctgg

SEQ ID NO: 12703 - DNA, 494 bp, Glycine max
  Coding DNA Sequence Number=SeqID_2924
gttcacgttcaagagcaaccatttatacaaaagattacagaaccaaccaaatttgaagaaatcaaagaaggctttggagctcctgtactcaatattaaacaaggaccagttcaccatgtagaagaaattggtgatgttcgccatgtcaatcttggtgaggatattaaagccgtcaccagacaagaattaattgaacgtcacattgtacctactgttacagaaatccgtgaacaaaaggttgtaaatgtaatcgaacaaccaattgttcgtaaaatcattgaaaaaccaatcattagagaagttactgktgataacacgttacctctcgtaaaagaraacattactcttcaatcacaatcatcatggaatgaagcagctccacttcaaagtaaaccaatcttgagtgaatcaacgttcaagcaagacgagatgagagactcttcattagaacgtgaaaaacaattaccacttgcccaagaatcaactcacgtcct

SEQ ID NO: 12704 - DNA, 575 bp, Glycine max
  misc_feature (53)..(53): n is a, c, g, or t
  misc_feature (164)..(164): n is a, c, g, or t
  misc_feature (174)..(174): n is a, c, g, or t
  misc_feature (360)..(360): n is a, c, g, or t
  Coding DNA Sequence Number=SeqID_2925
acagtcgaacgcatcccttataatgccaagtaccggagcaaaaccgcgacttncgtgggatcttcgtgggacacacacgaaactcatagtggtcgtctgatagagcgacaactagaccaggtcgtatacgctagccatataatatactctgagtgcgtatacangctcgtgccntctgcaccgtgcatatcgtatatcattaatcctctcctcggtcagacagctacaacgcaatatagcatattgcactcttcatctctccgtgcgtgagagagaatacttacatacgtgatacacacttactccttccacggaataatatcgttgcggccatgccacacttcctctcacgaagaccantcgctctcttacgatatcaatgacccacacactcgcgagcatcccacaagaagacgaatagactctctctctgtggtcactacattcctgtcaccgatctgctcttctgccactcccgacgacgatactctccatgcagatatctgcatctgtcacaggtatactacacagctataatgagggtagctgggaggcgacgcgcgacattcatacat

SEQ ID NO: 12705 - DNA, 395 bp, Glycine max
  Coding DNA Sequence Number=SeqID_2926
ttggaaaccttattgttgccccttggatcaaattttaataatgacatttcgttacgcgactttcaaacttgtacgcaaaatcaatctttccagatagacttttccatgccgtgtgggcaattttcacacggtcaactgtccaaacactattatgagattaagaatctaattaagtcttgtttttgttttattttttaaaaccaagttaactaaagaaaaccaaattattagaacaattaaataaaaataatgaaaataaaaaaaatttggtgttcaaatttatcttattttcaacccattttttaatctctattttcatttttatcacattatttgtcacgcctattattttttatttttgtttttattctcgttttcttccaccattatcctta

SEQ ID NO: 12706 - DNA, 512 bp, Glycine max
  misc_feature (66)..(66): n is a, c, g, or t
  misc_feature (208)..(208): n is a, c, g, or t
  misc_feature (244)..(244): n is a, c, g, or t
  misc_feature (298)..(298): n is a, c, g, or t
  misc_feature (384)..(384): n is a, c, g, or t
  misc_feature (483)..(483): n is a, c, g, or t
  Coding DNA Sequence Number=SeqID_2927
gcatacatccgcctctgagactgatcggagatcaacgaggtcacggtatatgaagagatgaccaancatctactatatcaacgctctcgtgcgtctacctgatgcaaatctccatctagacatgatcacaatataagtagaacataatagaagagaatagagataacatgtacgacatcaaaactgcacacataaagcgactgtagancgcgcgtgatgtaattatatggttagtcatatctantcacatcactagcgctacgaaatacaccgtacgacctgagcgacgctcgccgcncagtgacatcgacgacgctaacacacgcagcgcgtgcgatgagacgcacgactactgactgagagcgcatgcggccgggacgtgcntctcagtcgatgacgcagtgagcggtgacggtgtcaagtggttcggcgggttggccagacgcgtcagacaccagaaagaaatgtaacgggcaaaggagntgagtgcgagcggcgggactacatgaaac

SEQ ID NO: 12707 - DNA, 564 bp, Glycine max
  misc_feature (45)..(45): n is a, c, g, or t
  misc_feature (72)..(72): n is a, c, g, or t
  misc_feature (151)..(151): n is a, c, g, or t
  misc_feature (195)..(196): n is a, c, g, or t
  misc_feature (214)..(214): n is a, c, g, or t
  misc_feature (294)..(294): n is a, c, g, or t
  misc_feature (340)..(340): n is a, c, g, or t
  misc_feature (363)..(363): n is a, c, g, or t
  misc_feature (402)..(402): n is a, c, g, or t
  misc_feature (423)..(423): n is a, c, g, or t
  Coding DNA Sequence Number=SeqID_2928
agtgaagcgtctaatgctgattgaagaggcgtagcgagtgtgtcnggtgtgtgtgtaagtagagtggaggcngaaggagagtgatgccgtacgctagggcgtggagatggggagcgacgagcacatgaaggaagagtgagagaacagcatncgactcacggtgaaatgatagagtatacgtggtgagagatacanntaagaaggaaggtgcganataactcatacagatacacacatacatgctcatacgtctgagaatagcatagtggtgatagtgcaggctcctcgcccgcncgagagataatcgttgagatgagactagaaacagtgacgtgttgangagaatacaggaatcgtcgaaancgaatgtgagaatacgagcgaagctagagaaacaagtcncatctgcgtgcgcgcaaacanacagcctacaagtgatgggtagagactgatgatatagagaccacgatgtatgattatatgcagcgtaggatagaggcagggtagaggataaaggcgggaaggtgaaggcaaggtgtcagtaagcgcgagaggataggatat

SEQ ID NO: 12708 - DNA, 498 bp, Glycine max
  Coding DNA Sequence Number=SeqID_2929
actgctgcgcaatgtcaacagaaggagaagacgtgagaagatcaataacattttaaggacacatccttttactcaaaagaagagtatgctgccggagtctgagagatatggtgctccccttcattaattggggcaattcaagtgaatccatggaacattgattctgtcactaaagctatggattctgcattgatgggcccataggctgaaaagcagatgccgactgataagcattatagatatgtcagatacacatcaggttgcttattgggcacgaacctttttgcaggatctggaaagggcatgtagagaacatctgatgaggagatgctggggaattggttatggattaggcttgctagtgattgctttggatccaaactttagaaagctatctgtggaacatattgattcaacttataagaggaccaatcaccgagcacttcttttggattatgatggcactatggagcatcctgtgtcgatgagtacaactcc

SEQ ID NO: 12709 - DNA, 583 bp, Glycine max
  Coding DNA Sequence Number=SeqID_2930
gactttgtagctatcaactgctatgccccaaagcctctgcccctatcccctcttcctaagacagggacctttctgccattccgatggaatgccacccctgcgtaccataagtaccttcccgtggcagggtatcctaagatccatatcacaggggaacacaggcagtaagacaaatgcggcaaaggcctcagaatcatctttctgacgtgttcactcgttcgcgaccgctcgcgatcgaggctccctagaatttcgatccaaccctgcctgccccagtgaggaaagcggcccactacacctttttccacgcccacaaacagagtcatcaacgtatacgatcagcgccttcacacagtgttctacactgattcacgcaccctccctcatcggccatacagaggtgccccgttcctcgctagggaactctctcctcctccctacccacgcccgctatccccctcatcatctttttgtccttccctgctcatccaaaccttgtcgttccatctctgcccctttgccgaacaattggtaaacacccttacacttgaacttagcaacagatatggctctctatcaccca

SEQ ID NO: 12710 - DNA, 555 bp, Glycine max
  Coding DNA Sequence Number=SeqID_2931
aagccagctattcctccttaatgagggcaacagaaggaggagctccgcggtggtggcggctgttgtagtagtagaggatccggcgggcagcaggaattcggaggacatcatttagtagatcataatagtagaagaaggtgttgtagtagttaataaggtcgttcgtctcgtagtagcgctgttcttcttctcagcagtcattctcaacgacggcgaagaagaagaatatagttccaccgtcgtcttataacgccaactactgcggcggcggacagcagaagaagaagaagtgcagcaagggacaacaggaggagaaggtgaacatcatggttttcgttgatcaagcttcttacgacaatcttttctaagatgctaacaagttcatcatcatcacttccttcatcttctacggtcgtcgtagcatcaatgggtctcttagtaggaacatcagtagagatatgatgaataaaggcatcatcaggatgttttctcctcattctaagcagcagatctacagtaggacccaccactaataagcttgtcgcatcatgaggg

SEQ ID NO: 12711 - DNA, 574 bp, Glycine max
  Coding DNA Sequence Number=SeqID_2932
tacgggacagagacgatcatgcagtaacaattctatacagctagagggggtcggtcagagcaaaaaatgaggggtgggcagtcgaatcggcgctcacactactcaggctttgtatgtctggatacctcgtgcgcggcgaactactatcacactcgcgtccgcagcgggagtgtgggtgatacagaggatggtgtcataaagtcgtaataaatcaacataccccgagtaccgcgcgggcatgctattagtcctctcattctcgaatataagtgcatcacttgtctcagtatagagtcaggtcgtaacactgcacagaataaccaatacgactatcagctcgccgtgctaagaatgtcgcgtgaggagtataaacaagctagcgcgctgaatggtctatggagtcacgctcggcgcctaacaattacaatcactacgacgagaaggagtatacgcagagggcgcgctcacagaggtgcccgcgagggtggtaggaagcagcgaacaaaaatatgtacacatcctctctccttccctcttgtcggtcgttagtttcgatgcttagcggtgccgcgta

SEQ ID NO: 12712 - DNA, 506 bp, Glycine max
  Coding DNA Sequence Number=SeqID_2933
actcatagattctactcagcgtcggcaaaggagccatgggttctagcaaccaagttaccagtagaaatttgacctctctatcaagttgttcatattattcgaatcgaatgctgacagacgatacctcttgagactggtaaagtgctgcctaggatctaggcctactccatagtcgacagagcagatcagagcgttttgatatcatgttggtaatcgccctgatcattcacattacatgttggttcgcgggggttcatgatcagaaactaggttgggacaagctcttagcaggctaacgcagtcagaaattgaagatgtcctctcaacagttcgattaggcatggaagttaggaggcaatcagtctgcacaatcacaagggaaggcttcctagagaacgctaactttctagctcgatatttattcacacatggctacactatggggaaattacgtggggatctctcaatgtaaagtctcctttcttttccttcgacgacatttttca

SEQ ID NO: 12713 - DNA, 244 bp, Glycine max
  Coding DNA Sequence Number=SeqID_2934
agcatgttggtctcaggagattccatcctgtgtaggttatgtcaaatggtgtaccctcggatgcactcaattggtcagccggtgttcctgggacaatgtagcaatcaggaggaacatttggccaccgctaagaagtcccatcaagaaggccgtccagggccatgagctgagccacaagagatctgagtcccccaatagacccatcttgcacagtgatcagaacctcgtgcgattgggcaaggct

SEQ ID NO: 12714 - DNA, 506 bp, Glycine max
  misc_feature (195)..(195): n is a, c, g, or t
  misc_feature (246)..(246): n is a, c, g, or t
  misc_feature (289)..(289): n is a, c, g, or t
  misc_feature (378)..(378): n is a, c, g, or t
  Coding DNA Sequence Number=SeqID_2935
gcgcccgagcgcgtattcgatagtgcggctagcgatcccccaagccgtgtgctgctcttcctgttatatttgtatggcggctcgtgtctttcggcgtacgtctgcattatattactggtgaacgacacgtgaagggggggaaagtttatatttattcttgtattgcttgttttggttggggtgcggtaatgtcgnttgtgttggagattgagtacaatgggttgggcacggtgaggatttctgtcntttattttgacatggtggtgtagaggtttgtgacttgcctcgntcgtatttctgagttgttatcaactcctgtaactgggaatactctttattattcttgttgtgtatacagttactgcgcgcctcgttgangcgctcctttaccgtaaaaatttgttgtcaaattgttgtgcgggttgattacttgtcatgcctaaagttgggtggtccatccattatgtctgctctcacgtagggttgtgttgggtgcgccatccata

SEQ ID NO: 12715 - DNA, 328 bp, Glycine max
  Coding DNA Sequence Number=SeqID_2936
tatgtatttcccgttaaacagcttgagtttttcttgagcaagtgtacttcctagttgttatgatcaaaaaaggatttcctggagccccgggggatccatagttctaaaagggcccgcccccgggggggagctcccactttggttccctttagggagaggttaattcgaggttggcggaaatcatggccaaagctggttcctgggggaaattggtatcccgctcaaattccacaaaaataagagccggaaaaaaaagggaaaaccctgggggcccaagggggggccaacccccttaattgggtggggccactgccccttttccagaggg

SEQ ID NO: 12716 - DNA, 536 bp, Glycine max
  misc_feature (115)..(115): n is a, c, g, or t
  misc_feature (404)..(404): n is a, c, g, or t
  misc_feature (448)..(448): n is a, c, g, or t
  misc_feature (456)..(456): n is a, c, g, or t
  misc_feature (485)..(485): n is a, c, g, or t
  misc_feature (498)..(498): n is a, c, g, or t
  misc_feature (508)..(508): n is a, c, g, or t
  misc_feature (510)..(510): n is a, c, g, or t
  Coding DNA Sequence Number=SeqID_2937
tagagtgcacgtacggcaggctccaccacactgacttcgacgcgcgcgccaatgatgtactcgtgacgcccacatacgacagtacacgtgcagctcgcctcgcgcaccgacacancgtgcgcatacgcttgcaggctgctgtatctccttacctgtcgtatctgtatgtatcatacccgtgacactcgtcgctttggggttggtgtcgttgcctctcttttcagtcttacgtatctgtgctcttgcatagagcactcacaatacgtcgtattactaatcataccatctcattataacggtggataatataaatgaattacaggcggacacacataagtgatagttatctcttattgcccatcctgagagttgccacgtgtatcttatgcgcgaagcggcggacncacctcattgagaatctccatttttttgcacccggcgtcagtgncacagggncggggggcccatcccactccacgctccgnatctctcgcatanggctctcctncncgcaagaggtgtactaccgcgtctcg

SEQ ID NO: 12717 - DNA, 164 bp, Glycine max
  Coding DNA Sequence Number=SeqID_2938
ttatgttgcagacagtatgttcttgcatctcgtcacataaatatccttcataactggccatttcctgagaagcacttgcaattgtgttttaaagatggtctgaaggaggtgttgccaccatttggaggccaaacttctgtgtctacaaagtcactaaccaccct

SEQ ID NO: 12718 - DNA, 474 bp, Glycine max
  misc_feature (45)..(45): n is a, c, g, or t
  misc_feature (49)..(49): n is a, c, g, or t
  misc_feature (54)..(54): n is a, c, g, or t
  misc_feature (127)..(127): n is a, c, g, or t
  misc_feature (308)..(308): n is a, c, g, or t
  misc_feature (311)..(311): n is a, c, g, or t
  misc_feature (325)..(325): n is a, c, g, or t
  misc_feature (369)..(369): n is a, c, g, or t
  misc_feature (373)..(373): n is a, c, g, or t
  misc_feature (401)..(401): n is a, c, g, or t
  misc_feature (444)..(444): n is a, c, g, or t
  misc_feature (446)..(446): n is a, c, g, or t
  Coding DNA Sequence Number=SeqID_2939
tagcgactcatgcagcgccacgcgacggacgacacaccgtagagnaggnatctngagttcgtgatctgctcctcgtcagcatcgagaacatcgtcacggcgctcgaggcgcactgttaacatttctncacgagatgtatgacgagagcgacgacgcgtcacatagcgcacgcgtcagactactcacctcgtatcgtatgttctgtatctgctgtcgttatcacgcgcgtacgtacagcgcggacgcgatgctgcaccgcgcgaaagcaagcggcgatgcgcgacgtctcacgcgagatcaggaatcanagncgggaaagaagaangtggcgcgcgcgccgcgccagacgtgcgacggccattgtcgcgnctcnctgcggggtcgcgggtcgtactcgctgntcacctatcgcctcccgctcctgccgcttcaattgtcgcttcnangcctcggcggaacagagcgcagactgtc

SEQ ID NO: 12719 - DNA, 555 bp, Glycine max
  misc_feature (135)..(135): n is a, c, g, or t
  misc_feature (287)..(287): n is a, c, g, or t
  misc_feature (338)..(338): n is a, c, g, or t
  misc_feature (362)..(362): n is a, c, g, or t
  misc_feature (387)..(387): n is a, c, g, or t
  misc_feature (471)..(471): n is a, c, g, or t
  misc_feature (478)..(478): n is a, c, g, or t
  misc_feature (501)..(501): n is a, c, g, or t
  Coding DNA Sequence Number=SeqID_2940
gaatcccataccagcattctagactacagactagatgcacaccaccaactctgccggaaaacgctagacacacaataggcttatgagagaagcgatgagatgaataatatagcagcactcgcaccgacccagtgnacaagcagagatagatgttcgtgtgtctgaatgtgtgattgataggagggagggtgaagcacatagcgcatcaatataagacagcacactagtgatacgctgcgctccaagctccaccacaacctatgcacgctatacctcacattgtaganaaacgaactgtgtggtcgcgcctgctagcgcgggcgcgcgtacgatctctnacattcaaatccaacaaacagagngggaaaaataagggagaggcgaganctcgctgtatgtgcgtcaatactcacagagaagagaggggggagaggcgcccgctcgcgccaccacctcgcagcgtccgctatntctctgnggcggggtggggtgtggggtggntctcctaaagcgtagcaatatataatatatccacataccaagcggcgtgtcgaa

SEQ ID NO: 12720 - DNA, 392 bp, Glycine max
  Coding DNA Sequence Number=SeqID_2941
tgtgcagcggctaaatcagaaggagaagtggggcagtgttgtgctgctgattgaaagggaactggagactgctgattctgcagaggactgtgtgcggctgtgcttgctgctattgttggctgtgtaggctgtgtccgcagatgagtgagccaacaggccttgctgaggctttcgagaagctagctaagatcctcgaggagtcgaaatctggggccatcgttcctcgacaggaagtggctcagaagatcgaactgtcgcccatggacatgaagttagagggggctaccaattatctgagctggtcccgaagggcgttgctagctgtggaacagaaggagcttgatgggcacttgttgggtgctgttgctgaaccaggagacaagactaccgtg

SEQ ID NO: 12721 - DNA, 576 bp, Glycine max
  Coding DNA Sequence Number=SeqID_2942
gagccaccatcatgaccgacgataggagaccgagcgctgagagcggaggtgggataagtagagagtatgggatatgaggatacggtacatattcgtatggagtcatgattgatacttgtgtagaatggtggtgtggtgcgtacgattatacttattcagttcagctaattatagtaagataattattttcatctgtctgtcgagattatttcatcattttgatcttgatcagtggtgcttcagtggcaggtggaagcggcgcgagagttgggatatcgtaatagatgtgttgtagctcaagtcccctcttactcatttctatgtgttatctctataattgattactttagcttttatgtgaagataagaaggtatatgtaactatactatttattctttctcatctgtatagtgagtctggctggtggcggtggtggagcgatggactggtgtgctctatgcaattcgtaagttgagtgctgctcgtatgtaaaaaaataaattattgaatattaacaaaaaagaagggagaggttcgctaatagttaagatggtcaccacaaagcaatgccatgg

SEQ ID NO: 12722 - DNA, 439 bp, Glycine max
  Coding DNA Sequence Number=SeqID_2943
tggcgcgctgttattgttccttttcctcgtgggtgttcggtgtggcgtgctgtgttgctgcgctttatgtttgaggggttttttgtgtggcttgttgttttttttttactcgggtttgttgcgttctcccgttttggtgattgcgtttggtcacccgtcgggggggggtgtttgtgtttctttggacgttttttgggtggttctttttttattttgtcggagactggtttgggccgttttgtgatggggggggtttttttgtttttgtggtggtggttctctcgtttgtgggggttcccggttagttagggttccggcactttgtttaccggtcccgggtttggcctctactgttggtgccctgcagttggcttgccccggttctcggtcggttggttctgttgttgttggtgcttctggtcgcttccgtagtcttcgc

SEQ ID NO: 12723 - DNA, 350 bp, Glycine max
  Coding DNA Sequence Number=SeqID_2944
agcccggtcacctttgaggtagcttctccttccaaaaattctgatttggttattttgagagggatggggggggcccttcctacttaccttaaagctctgttttaaccgggtgcttttaaaccttccatgggggaaaacccgggattggccgaaaaattggtttaaggggacctttttggtttttttttcaaattcgggcccgccagttggaaactttttttctccccggttgttttataccaggcctccttgggggggcctgaaagaatccttttgggtaattggggttaaaatttttcccgttctttttggttttttgccccggggacctccgagcttggggaattaga

SEQ ID NO: 12724 - DNA, 562 bp, Glycine max
  Coding DNA Sequence Number=SeqID_2945
agaacgcacatcgtggctagccggactattgataattcgtcgagaacacgcaacgcgttcggtcgcccaacactagttccagctgcgttgtccaatgaggggatttcatgtctgcgcgtgggcgtccggctgccggaggaggcactgttcgattgctttgagcagccgaaccttcatggcaaggtattcctcctcgtcgatgtcggcctgagtttcccggggcagtgcaggaaggacctgatcccgaaacagtgcccagcccatcaagtcgagtttcgtgctgatgaggcgggtaagttccgcctggcccccaaacagctgaatcaccgatggactgggacagatgccccgggatagcaacagttccaaatcatagatgtcgcgcggggcggtacgacgctcatcgaggagtgctgcgacttgttgtccgccagcgcctgggtcacagcattaagagcaatggcatcattatatgatgctaatgatcttaatcaaacagctcgctactctttgtgatgattccgtaagttgctgatttcattgacgtggttcgtgggctcga

SEQ ID NO: 12725 - DNA, 573 bp, Glycine max
  misc_feature (32)..(32): n is a, c, g, or t
  misc_feature (73)..(73): n is a, c, g, or t
  misc_feature (213)..(213): n is a, c, g, or t
  misc_feature (385)..(385): n is a, c, g, or t
  misc_feature (504)..(504): n is a, c, g, or t
  misc_feature (514)..(514): n is a, c, g, or t
  misc_feature (533)..(533): n is a, c, g, or t
  Coding DNA Sequence Number=SeqID_2946
gaaacaaacaaacacgagagcatcgatacatnggataatgtgtgtgaagcttgccccacgaatgagtcgtgtngtctggattgcgtcgggtgatgatggcgtcgtgttgttggtatgttgtctgtggacggttaattgtagtgtgttgggagtgtgcagcgcaaagccgattataaggaagtggggtcgaggataagagtatggtggggtggngtcggggggcacacaagactagaagtatttggacatcgtgtattagttagttgatggatgaacacatagaggaggcagcccaggcgagacgaggtcgctcgctgcccccgccctcttatatatgcagataccgattgtaaagaggtgacggtgttgtttgtcgggatagtgnggagcgggcagcgtggtgggcctgtgttcgaagcgtaagtaggggaggagaggtaggacctggacgacacgcgtgacgcgagagacggttcgcttatatcattggcttgtatcgctctntttcttcttntatattatgatgatcggtnccggacgctctgggtagtatatgagaatgccatgtgtgtc

SEQ ID NO: 12726 - DNA, 121 bp, Glycine max
  Coding DNA Sequence Number=SeqID_2947
cagcaggtcgatggccaggtagatacgcaccgcggctggatcgaggctttgctggtcgagtactacgatcccatgtacgtgttccaccgcgagagcaaatccggtcggattgaattcgccg

SEQ ID NO: 12727 - DNA, 575 bp, Glycine max
  Coding DNA Sequence Number=SeqID_2948
gcaaatcgccaatcgccatcgtcttctttgtctcctccagcgagccacaggaatcctctccgaccaagaacagaagagagaagagatgggagggttccagcgtcaggtgaaggagcggaccatggaggtgaaggtggcggtgctcaagggcgtcaggttcgtcggcgacttcggcaagaagacgtggaacaaggtcaaggacatccagcgctgatcgatccattcatagcatctccccggttgtttgtttcccttcgctccagtacactagttgcttcttgtacaactgcctgataggataaccgactggccttgtgctcccttttttttctctgaatgtggctgtgaattggtttggatggaactgattttgaatcaactttttgttgcgcaccaacccccctgccagtataaggttttatttattctctctttttatttattcatttaaaaagtttaacagacaccacccaactttaaggggtgttttcggtaccccaattctcaccttaatagtgattacttaattatcctgcgcccttcttggtctctcctcttttacaatagcctcagaa

SEQ ID NO: 12728 - DNA, 565 bp, Glycine max
  misc_feature (26)..(26): n is a, c, g, or t
  misc_feature (105)..(105): n is a, c, g, or t
  misc_feature (125)..(125): n is a, c, g, or t
  misc_feature (135)..(135): n is a, c, g, or t
  misc_feature (154)..(154): n is a, c, g, or t
  misc_feature (237)..(237): n is a, c, g, or t
  misc_feature (303)..(303): n is a, c, g, or t
  misc_feature (311)..(311): n is a, c, g, or t
  misc_feature (341)..(341): n is a, c, g, or t
  misc_feature (354)..(354): n is a, c, g, or t
  misc_feature (380)..(380): n is a, c, g, or t
  misc_feature (387)..(387): n is a, c, g, or t
  misc_feature (429)..(429): n is a, c, g, or t
  misc_feature (458)..(458): n is a, c, g, or t
  misc_feature (465)..(465): n is a, c, g, or t
  misc_feature (469)..(469): n is a, c, g, or t
  misc_feature (477)..(477): n is a, c, g, or t
  misc_feature (491)..(491): n is a, c, g, or t
  Coding DNA Sequence Number=SeqID_2949
atatatcattactacacgctacccantgttgtgtcgtaggtctgtatgcaatactactatcgtacgcactataccgacgcgactacacactgcgtaatcatgccngtgtactacaacgaactgantgcatgctgnacatctcaatagcgatcgntcagaaatactcgagactatatagatatatcgaagtagaactacacacatcgactacactcacactatgtacaacgacaagcntgatacaatgacaagtgagagtgcattgacataactcagccgtaatgcatacactgctgcttctgnctatgccncatgagtgaatgcggccgtgtagatgcatngctggtcagcccngatacagacacatcgatgcagaaganatatatnacatatatgcagatagtcgttagaatctcatcacatcacacncgcatcacgtactcatctaattactacanagtatgntcangttgaganctacgtacatgacnactatcatgcattgtgtgaatcatcgtactatgatctacaatagacaacgatacgctcatactgagtacgacta

SEQ ID NO: 12729 - DNA, 427 bp, Glycine max
  misc_feature (81)..(81): n is a, c, g, or t
  Coding DNA Sequence Number=SeqID_2950
aaaatggttctcctcgtcctatccaccctcccacgggcaccctacggagcagccgcgtccacatcgtcgccgacgccgttntccattcacccgcggccaaggcggcatcctctcgccgtcgcgcgctgctccgctcgtctgacgccgccgcccaccgccgcagccaccggcagggaggccgctgcttcttgggccggcaagctagccggcgccgtgccatggaaggccgccgtctccagcgcgctcgcgctcaccttatccttctcctgctttgttggtttggccaatgccaaggctggggtcaacaaacctgagttgctccccaaggagttcaccaccgtcattgacgtcgccggttttctctcttcaggccaggaaaatcgtttgcgccaagagattgaagacctagagaaggacactgggtata

SEQ ID NO: 12730 - DNA, 244 bp, Glycine max
  Coding DNA Sequence Number=SeqID_2951
gtccgggttcctcgcaacagcccggcccaaggacgcagttctgggcctgctgctttgcttcacaaatctgtcatgaaaaagggagtttccgtaaggatgggcaaaaggctggtgccaaaaatcaagggtgagggctcccaaaggcataactactacaggcctgattcttcaaaaggggcagccttctggcaaggattggaagcggctgttcaaataggggagcccttaagaggttagccttaag

SEQ ID NO: 12731 - DNA, 455 bp, Glycine max
  misc_feature (40)..(40): n is a, c, g, or t
  misc_feature (50)..(50): n is a, c, g, or t
  misc_feature (71)..(71): n is a, c, g, or t
  misc_feature (99)..(99): n is a, c, g, or t
  misc_feature (132)..(132): n is a, c, g, or t
  misc_feature (197)..(197): n is a, c, g, or t
  misc_feature (258)..(258): n is a, c, g, or t
  misc_feature (274)..(274): n is a, c, g, or t
  misc_feature (332)..(332): n is a, c, g, or t
  misc_feature (344)..(344): n is a, c, g, or t
  misc_feature (348)..(348): n is a, c, g, or t
  misc_feature (367)..(367): n is a, c, g, or t
  misc_feature (371)..(371): n is a, c, g, or t
  misc_feature (376)..(377): n is a, c, g, or t
  misc_feature (403)..(403): n is a, c, g, or t
  misc_feature (407)..(407): n is a, c, g, or t
  Coding DNA Sequence Number=SeqID_2952
gtcttatcggattgtcatcgtagccagacatatcgcgtcntgcgtatttncttctttggataatgtccatnagtgagtatatatgccatgctccgctgnctcggaggagcgaggatgtgagaatatagtggnttgtcgttttttgtgctaactatctagaacatgatggttattatcgtggtggtgggtacaggtgncctagaatgttgcggtgccggtatgagcagcatctcaacaactcaccttctaatcgcggtnaggccagacaataaangaaataaagcattcatatacactgtagagaggagccgagcggtcttcctggtcacaangtatcgtcgtgnaccnttcgctctgcgggtgtgtnttgnggtgnnggagtggtgcggtatgtataacctcntatntttatgtgtggttgtactctactcttgtagagtagaggagcatcggct

SEQ ID NO: 12732 - DNA, 352 bp, Glycine max
  misc_feature (63)..(63): n is a, c, g, or t
  misc_feature (103)..(104): n is a, c, g, or t
  misc_feature (121)..(123): n is a, c, g, or t
  misc_feature (137)..(137): n is a, c, g, or t
  misc_feature (207)..(208): n is a, c, g, or t
  misc_feature (230)..(230): n is a, c, g, or t
  misc_feature (273)..(274): n is a, c, g, or t
  misc_feature (279)..(279): n is a, c, g, or t
  misc_feature (302)..(302): n is a, c, g, or t
  misc_feature (326)..(327): n is a, c, g, or t
  Coding DNA Sequence Number=SeqID_2953
aacacaaacaacacgccaggttcctaatcaggacagaaagagcagcatagctgtggctcgcancatccttctcatagtcgaatttgtgaccaatattttcctnncaaatccctttcactgnnngtttaagagggagnacaaggtggtaaaccaaggaaggagggaggactttgccaccaacgccacaacgaacgctgaagggcaagnntggcgacataaactgttgaggnttgagaagcttcagctctaagaaagtggtgcaaagacacaccnngcagncttcaagctacaaccagcgcccnttgaaggcacggaggcagcactgnngttcgtcaacagggttctcccaagc

SEQ ID NO: 12733 - DNA, 177 bp, Glycine max
  Coding DNA Sequence Number=SeqID_2954
caataggaactattgtcggcagtttgggagctaacttggcaaaggagaggattgctgcagtggagatcttgttgagatgcatggaagaagatggcactagcaggaacaacattgctgataaagcagagctgacacctcttttggaaaccttaatcgacagcccttcaagatcaatgt

SEQ ID NO: 12734 - DNA, 508 bp, Glycine max
  Coding DNA Sequence Number=SeqID_2955
tggtcgcgacggtgctcttcgtgctgctgacgccggggctgctgttccagctgccggcgcagggccggatcgtggccttcggcagcatgcacaccggcggcctcgccatcctcatccacgccgtcatctacttcgccctcatcaccatcttcctcatcgccatcggggtccacatctacgccggctagaccccacacccactcctcttcgccgcacatctccgccgtgcgtgcctatgaagctttgctgtcccggaggcggcttctcttactattaccgcttgtattgtacttactgtgtagtgggtaccttctattattgtcttcttcatttaggtggccagagaaacaaatatggtttgttgtttgcctggctgggatttcgtttgagatggctgccagtggcatggcgctctccgtctctgggatgaaaatttatccagaaaggctggctggtgttgctgctgccgttgcccttgtgattcctctcttgagttaaccttggacat

SEQ ID NO: 12735 - DNA, 561 bp, Glycine max
  Coding DNA Sequence Number=SeqID_2956
tcaagaccatccacaacgacgttgtgcgaagtcagcgcatgcgccattcttgcttgcagcrmgtawraagattggccgcaaggagtcttgggactaccaaccgccggccaatgacaaagaccgcttcatccgttcccacattcctctggatgagcttgaacgtcgcgcccgcttcccgatcgtggattatctgggccgcgagaagtcagcttcagcatctcatcatggtcttgctggggccaagggccagtgagagtacgctcccgtgttgagcgcgcatgacgatttccttyttcgaccaatttgkgtcgctactggtgctggatgtytccaacatttcaacactactttgtagsgtyttctccttatgtyttctagcgactcatggsgttatgaatttacggcgcgggatgtgtactgccgagcgctytgcatgcagsgtgatcagaatgagccgcattaatggtgtttgggagcatttgaaggcgkgtcgtcttggcgatttatctgatattcatgaggcccagagcgagacmcagacgatgatcagcctggctatct

SEQ ID NO: 12736 - DNA, 471 bp, Glycine max
  Coding DNA Sequence Number=SeqID_2957
aattctactaaaatccaaggctttgaagtcctcagctttgaaggtgtcgaacttactcgaaccaaaggtgacaataacttctttgtcgatgtcggaactctctttgttctctacttccaagaaagcgtccgtttcattttaaaccttaatgaatggtcttattgccttttaaaaagactgcctgtgacttcatcaagtcgaaccaatatgaagcaaaggacctatactcttcctgctgaagacgggttctatatgctaaaggtctcaaagatccctcatcctgaagctattcaaaattttgagacgattttagaacattgcacttcattctcgtatcaaggagaagaagagtttggagttcaaaaggatatgagttctcgagagagaattggagaatatttggaagatgcaggatatcatcaattgagtgcttcagaaagaatcaagagaaaattcgctcaaatgactgat

SEQ ID NO: 12737 - DNA, 541 bp, Glycine max
  misc_feature (45)..(45): n is a, c, g, or t
  misc_feature (504)..(504): n is a, c, g, or t
  Coding DNA Sequence Number=SeqID_2958
gaatctctccatatctaatttcgtgtcttctacacgtactcatgntcttcgtcatctccgcatattcatgctcctctcacatcccctatcactactagctttccttcacatattctatatcccatgatatataccatacacacgtgtcgatttcgtcttagacatttccggtaacgttatagctcatccccctctccgcatctaagcttgaatatctcatatcttttatacatcagagggccataaccaaacaacaaacccatctcgcactcgtgcttcgctctactcatccttcactgatcttattcttactttctcatctttcatgatcatgttctatcgtatatttcttctgtttcatcttttcggggaataataatacgcttctcttctctcccctctatcccacttgtgctcattttcctcttataaatacctatctttcctctctgtctctctatactcacaacatccacctgccatggccctccccgccctccctgncgctcgtcaatcgctccgggcgttactactattatac

SEQ ID NO: 12738 - DNA, 563 bp, Glycine max
  misc_feature (31)..(31): n is a, c, g, or t
  misc_feature (33)..(33): n is a, c, g, or t
  misc_feature (94)..(94): n is a, c, g, or t
  misc_feature (96)..(96): n is a, c, g, or t
  misc_feature (111)..(111): n is a, c, g, or t
  misc_feature (113)..(113): n is a, c, g, or t
  misc_feature (117)..(117): n is a, c, g, or t
  misc_feature (128)..(128): n is a, c, g, or t
  misc_feature (237)..(237): n is a, c, g, or t
  misc_feature (288)..(288): n is a, c, g, or t
  misc_feature (308)..(309): n is a, c, g, or t
  misc_feature (323)..(323): n is a, c, g, or t
  misc_feature (411)..(411): n is a, c, g, or t
  misc_feature (413)..(413): n is a, c, g, or t
  misc_feature (452)..(452): n is a, c, g, or t
  misc_feature (462)..(462): n is a, c, g, or t
  misc_feature (467)..(467): n is a, c, g, or t
  misc_feature (521)..(521): n is a, c, g, or t
  misc_feature (523)..(523): n is a, c, g, or t
  Coding DNA Sequence Number=SeqID_2959
gtgactaagcgcgacgacaccgtcgtagacncncttctggacggcgccgtgtagcgtatctgacagatctactgatggtatatacgcgacgcangntccatagagagaacnantacncatgcgcatantcgcaggaagtgtagtaagcggtgtagtagatatcgtcgtcgtcacagcattgcagctgttggatacggtataatcagcggagaacaagttcggatgagtgtagatganaaaacgacaagaatgagataaatatatgacagacactcggtgagagtatancaagtgtggagacgagcganntattgacgataggnaccgcggtctcggttagcagggtgcgtcgatcggtgcgtcgaggcgcgtcgcgtgtgtgaccggcagccatatctctgcagcgtcgancntcatcgtcggataggtagagagagcgcgagacgagatgncgctaatagntgccnataatgtgagtctcgtgaagatcatgcgcgaaacgcagcatcatcttcacatcnanatcctacagcttgtcggatatagctatctacatgtaatgc

SEQ ID NO: 12739 - DNA, 521 bp, Glycine max
  Coding DNA Sequence Number=SeqID_2960
atggcccgcaggttcttctctgagttcatgtcgccctcgttccacgcgcctccggccagattgggcgctccaagcccggccatctccgccgcccttgcccgttctggccggatcccgccggttgggccccgtccccggccaccggtgccctcaccggagaccacctgcaccgtccgccaagtccctttcttcacccgctgcatcctctgcctcgctcgctcgtcccagccttcgttgaccgcgtcctgtctctcctgcgccaagaccaagcctgcgtccaacctccccaccgagccggcctcaaggcccgatgtacaggttatgcgatgatcatgacgcgagagcgatgttttgcttgtgttggcgttcttcttatgcttcttcttcgattaggggataggttccaggtcggcagcctgggctagcagggtggatgtcgtttgagtttctgtttgtgattcattcgtagtcggatggtgctcttttgtaatatgatgttgtattcgtgtggcattgtatgc

SEQ ID NO: 12740 - DNA, 557 bp, Glycine max
  misc_feature (231)..(231): n is a, c, g, or t
  misc_feature (383)..(383): n is a, c, g, or t
  misc_feature (437)..(437): n is a, c, g, or t
  Coding DNA Sequence Number=SeqID_2961
ttccggcgcgcgaatagttgagagcggctactatacatgtgttgctcttgttttcactctctcctgcgtgctgctctttgtgtctctgttacgtggtggtgttctacgtgcgagaacctgacgcaaacgcgccagcacactacgagcgccacaatcgtgcacgagatagaatagatgctatcttcgcgatactagaccgatccatccccactactgtatactacgtgttgntggcgtacgctccacgcgcatacgacgcccgttactcacacgctagcgcgcgcatcgacctccgcgcctaccgtgcagtcgccggcataccttttacatcgctactaggagacacggtctcacgtacagcgcgcctccggccctcacttccnactcgcatatccacaaacatacgccaactaccaatatcaactctcacactatantgtgtcactcactatatagcacctattccgcatagtatctcttactctgtctgtactgccgcgaggatcgcagtgctcgcaactgctgcgtgtatctctaatatactcgacctaacacac

SEQ ID NO: 12741 - DNA, 579 bp, Glycine max
  misc_feature (125)..(125): n is a, c, g, or t
  misc_feature (441)..(441): n is a, c, g, or t
  misc_feature (487)..(487): n is a, c, g, or t
  misc_feature (505)..(505): n is a, c, g, or t
  misc_feature (508)..(508): n is a, c, g, or t
  Coding DNA Sequence Number=SeqID_2962
agtattatctacacctcgcattcatctattatattcgtgtgagaaccaacaacctctaacgcgcgtattgatactatgcagagaacaattgtatcatgtgaaacaatcatacgcgccacataggncgagctgctctcatctatctcaatatttacatatgtgctatatatatacttatcttatctaatctctgaacgtcatatcagaagataccggtcatgagtatatcatcatataacaacaagattactcctaatcgtgcttcatgtctaccgtaagatcctgcattccttatcgctctctccttatctatcgactgccgtgcttcgcacgcgttgtgtcacgtcgcgcatccacatacaacttacacatatgtcgcggtctctcgatgtctcaaacattatcgacgttagtgctatactcactcatgctcgtcatccnctgtctcactctcattcatcaatgcgtctcgactcactcacttacntctcaatagcgcctcacnctnctcagcgtctgcaagctacatatatgtccactgacctctaatatatatatctgtcttagtacacgcacgcg

SEQ ID NO: 12742 - DNA, 529 bp, Glycine max
  misc_feature (26)..(27): n is a, c, g, or t
  misc_feature (112)..(113): n is a, c, g, or t
  misc_feature (137)..(137): n is a, c, g, or t
  misc_feature (173)..(174): n is a, c, g, or t
  misc_feature (178)..(179): n is a, c, g, or t
  misc_feature (192)..(192): n is a, c, g, or t
  misc_feature (195)..(195): n is a, c, g, or t
  misc_feature (198)..(198): n is a, c, g, or t
  misc_feature (207)..(207): n is a, c, g, or t
  misc_feature (219)..(220): n is a, c, g, or t
  misc_feature (223)..(224): n is a, c, g, or t
  misc_feature (237)..(237): n is a, c, g, or t
  misc_feature (265)..(265): n is a, c, g, or t
  misc_feature (270)..(270): n is a, c, g, or t
  misc_feature (282)..(283): n is a, c, g, or t
  misc_feature (291)..(291): n is a, c, g, or t
  misc_feature (297)..(297): n is a, c, g, or t
  misc_feature (304)..(304): n is a, c, g, or t
  misc_feature (319)..(319): n is a, c, g, or t
  misc_feature (326)..(326): n is a, c, g, or t
  misc_feature (347)..(347): n is a, c, g, or t
  misc_feature (366)..(366): n is a, c, g, or t
  misc_feature (390)..(390): n is a, c, g, or t
  misc_feature (393)..(393): n is a, c, g, or t
  misc_feature (396)..(396): n is a, c, g, or t
  misc_feature (409)..(409): n is a, c, g, or t
  misc_feature (414)..(414): n is a, c, g, or t
  misc_feature (418)..(419): n is a, c, g, or t
  misc_feature (425)..(428): n is a, c, g, or t
  misc_feature (431)..(431): n is a, c, g, or t
  misc_feature (435)..(435): n is a, c, g, or t
  misc_feature (448)..(448): n is a, c, g, or t
  misc_feature (454)..(454): n is a, c, g, or t
  misc_feature (458)..(459): n is a, c, g, or t
  misc_feature (462)..(464): n is a, c, g, or t
  misc_feature (476)..(477): n is a, c, g, or t
  misc_feature (480)..(480): n is a, c, g, or t
  misc_feature (501)..(501): n is a, c, g, or t
  Coding DNA Sequence Number=SeqID_2963
agagagagcaagaattagcggtgtgnntagtgtgagcggaagcatgtgtcggagtagatagacgtgtgcgagagagagagatgagtgtagatgacacttagagtggtgctgnntgatgtgatatgatgttcatgagntgtatgattgtgatgcgtgacgtgtagtggtgatanncagnnatcggtgcgtgtntgntgnttagtcgtncttcacggcgannagnntgttgcatgatgnatgagatgatgagatggtgtggagagancgagnactgagtgccannacagtgtncagtgnagcggantgcatagtgagacgncgagagngatgtgagatgtgagtcgagnagagcaaagagagacgagnacgagatgttagaagagcgttagnagntantcgtatgctgagntgtgntagnnttaagnnnnagnacgntgaagagacgcgncaaganctgnnagnnntgtcatgtagcnnagnagagtcgacgatcgtgtgggncgtgcatgagtcgtatgagtcgtgacac

SEQ ID NO: 12743 - DNA, 589 bp, Glycine max
  misc_feature (27)..(27): n is a, c, g, or t
  misc_feature (95)..(95): n is a, c, g, or t
  misc_feature (199)..(199): n is a, c, g, or t
  misc_feature (218)..(218): n is a, c, g, or t
  misc_feature (231)..(231): n is a, c, g, or t
  misc_feature (275)..(275): n is a, c, g, or t
  misc_feature (350)..(350): n is a, c, g, or t
  misc_feature (357)..(357): n is a, c, g, or t
  misc_feature (376)..(376): n is a, c, g, or t
  misc_feature (418)..(418): n is a, c, g, or t
  misc_feature (473)..(473): n is a, c, g, or t
  misc_feature (489)..(489): n is a, c, g, or t
  misc_feature (554)..(554): n is a, c, g, or t
  Coding DNA Sequence Number=SeqID_2964
aacgctgcgcgcaccgatactaatacntacacaccgcgagcatatctctgagtactgtagtgcgtgaggcatattgtgagtagtagagatatatnatacaaatcgcgctggctcgaccgcgaatataaatatgacgcgcgcggtgcgacgtcggcgatgcacatagctgggttatgagcatatgcgacgcgacgacagncatgcgcgtccgcgctgcncgcatatatatangcagcaactaatcatgactatcgtcagggtcgcgaatcatatcntctgtcgtgctcgcggcgctgcgtgtgtggtcggctgctgtcgacactacaatacatgacgtcgcgtcgtgtgtngtgtgtngcgtggtaaattgtgaaantcgacgagagcacatgacactgcgcacacgcgcgcgcggatncacatgcgcgcgatcaaatatctactctatcagcatctatgtatcgatgacgtgntcctgggtcgtgtcgnaatttaatatgctgtgtgcacgcgcggcgcgtcgcgctcgcgcgagtattgcgaatgactgtatnatcatgtctgtgtgctaccccacacagactatata

SEQ ID NO: 12744 - DNA, 125 bp, Glycine max
  misc_feature (45)..(45): n is a, c, g, or t
  Coding DNA Sequence Number=SeqID_2965
gtgaagacctcacggggcagaacatcacccttgaggtggagtcgnctggaaccatgaacaacgggaggcaagatcaggaacagggaggatttccccggaacaggaaggccttatcttccctggaa

SEQ ID NO: 12745 - DNA, 459 bp, Glycine max
  misc_feature (72)..(72): n is a, c, g, or t
  misc_feature (180)..(180): n is a, c, g, or t
  misc_feature (189)..(189): n is a, c, g, or t
  misc_feature (315)..(315): n is a, c, g, or t
  misc_feature (374)..(374): n is a, c, g, or t
  misc_feature (403)..(403): n is a, c, g, or t
  misc_feature (431)..(431): n is a, c, g, or t
  Coding DNA Sequence Number=SeqID_2966
acaggacacagtatgatggatgagttgtcatgttatcagacggcacaggttggagaacactctggaggaganctatatatgtctgctagtaatggagtggcgagagaggcggtcgatagagacgacagccgaactgaatacgcgatgcaagacagcagggtgatagcagagctttataangctgaacgntgagactaatcagacatagtgacacaggacttcggatgtgtggcgtggattaacgcatatactcggagttgcagagatctacactctcggcgcgcagcgaaacatatatgtcgggcgagaagtgtnttgtgcgcgggataaggaaagatactgattatcaggacatcaagagactgtgaagatgngaagacacacgtgaaaacgagaagaagtnagagcaaagagttttgtaacgttatgcngcgagcaatcagcgaagagcagacaccc

SEQ ID NO: 12746 - DNA, 361 bp, Glycine max
  Coding DNA Sequence Number=SeqID_2967
gaagtgcttctggacgttttatatgtcatgttttttttaggaggcgtcagaaacctgtttgccaggaaggatccgagggtcgggcggtgtactgcaaggcacatggaggtggcaggcgatgtgaattccttggttgcacaaagagtgcacaaggacgtacagattactgtattgcccatggtggtggcctgagatgcagtcatgaatgttataccccggctgccataaggaaatctggattatgcatccctcattgtcggcgcaatagatcctccatagaaaattgttccaagagtgctcaaagcccatcatgtctttggatctcacatggtggatggcgttaatgccaagttcctgtatg

SEQ ID NO: 12747 - DNA, 563 bp, Glycine max
  Coding DNA Sequence Number=SeqID_2968
atgttgacacttcaggcgactcgtactcccaagctatgttagcgttctatatctcaaaagatacttgtctgttactatcgattacagattctaggaattagtgggcgtggacatcatattccgtgcgttatgagcggagcataacatataacgaataaaaacctctattacgatctctggcgccgagcaggaccgcagtaagcacgcgtacgtgcgccgcgccttgctagactctacaccaaattaatggtcggtgagagtatgactctatcctctgtcactgctaactattttttcctcgctgcgggggaggcgaggtatctctgcctttagcatgaagaccgaagagtgaatcagtattccgttcgcggactgggcgcgggttattggcggggatagagagatgattgtagtaaatatgccgcgataatttaagtttggtttagtcagtaaacaggtcaactacagaaaaaacaaacgccgtactacccacacgtttggtgggagagaattcttacgctttcggctcggtactgggatgtctactagggacgaagcgccgg

SEQ ID NO: 12748 - DNA, 503 bp, Glycine max
  misc_feature (201)..(201): n is a, c, g, or t
  misc_feature (217)..(217): n is a, c, g, or t
  misc_feature (441)..(441): n is a, c, g, or t
  misc_feature (453)..(454): n is a, c, g, or t
  misc_feature (459)..(459): n is a, c, g, or t
  misc_feature (462)..(462): n is a, c, g, or t
  misc_feature (467)..(470): n is a, c, g, or t
  Coding DNA Sequence Number=SeqID_2969
gatacgagcatacggcatgcgcacacacacgcgagcaggagagcaggacgggctgctactccgcagtctgatgctatacggggaacactcctcgagatcgtattaactctcattaccagaatagcaggtgggtatggattgctccgtgtacagggtgagagtaacagagcaagattgcaggctgagcaagtgtaagagcantataactctagagagnccgagaacacacccacctccgggaggctacgcgccgagcaatcgatactaaagactatatgttatctcattctctctttgcgaatactgtccggcactgttagaacagagtaatagtgctcctgcgttggtgaaactcttcacagcagagagggaagtggcgatatgccaacctaacatactttagaggccgcgcgcgcctcttcgagagcgggaggacttggnaaaatatcttanncacanggngaaannnnaaataatagagacacacagacgatgagacatag

SEQ ID NO: 12749 - DNA, 468 bp, Glycine max
  misc_feature (26)..(26): n is a, c, g, or t
  misc_feature (186)..(186): n is a, c, g, or t
  misc_feature (273)..(273): n is a, c, g, or t
  misc_feature (280)..(280): n is a, c, g, or t
  misc_feature (346)..(346): n is a, c, g, or t
  misc_feature (417)..(418): n is a, c, g, or t
  misc_feature (432)..(432): n is a, c, g, or t
  Coding DNA Sequence Number=SeqID_2970
gtacataattacacgctgcgcgtggngtcgtctgcgctgacgggacacctcactgtcggcgccgcatctcctccgcgcatcggtcactgtagggcggtctcgaacgcgctgcgtcgcgaggcgcacacaaagtgaatagcggagacgagaccgcataaaagagaatagcacaagaatagcagacanggtacagcacgcaagagagaccgcagacgcaacctcgatctaatcgacgacacgtcagcccgcgcgcccgctacgtacatgagaacngagacgnaaacgcggagcgagtgggccacgcggagaagtagaagagagaaaagaatagatatatatactgtcnatataattagatctacgttatcaataagatcatacaaatataagcagatatatataataaaagtaactaannttttcgtggcgcgncggtgtgttgtcgcggcgtcgatgtacacattaaat

SEQ ID NO: 12750 - DNA, 285 bp, Glycine max
  misc_feature (34)..(34): n is a, c, g, or t
  Coding DNA Sequence Number=SeqID_2971
aagacaccttcatataccgccagaaatcaagatngaaggaagctctgacgctgaagaagccagacaaatgattgtgatgctaaagctgaagctgaagctcaagaaaagttttgaatgaatgcttgcttgcttgattgaagaaactattgaattggaattgactgaaaacattttggaatgaatcaagaggtacatttacgcggtttaatttggaaagaacctatcaatctattgtgaaatgaagaagacaaatgaagatttgctctcgcaggaagaatcaatcaa

SEQ ID NO: 12751 - DNA, 560 bp, Glycine max
  misc_feature (305)..(305): n is a, c, g, or t
  misc_feature (343)..(343): n is a, c, g, or t
  misc_feature (512)..(515): n is a, c, g, or t
  misc_feature (518)..(518): n is a, c, g, or t
  Coding DNA Sequence Number=SeqID_2972
ttacgagacgcgacaaccgaccgatcatgtgcactactgtattatctctaccgccccctcgtttctcgtcgtaagtataacgttcatacgtatacttaccgtgaggtaggatcatacccgcgcacccactcaccacgtatctccatatcgacacgttatccctcgccgcatccaccgaccgtgtccacgccctatctccacctcgatctctagacagagcctagacgcgcgatgtacgtcgtccttctcactccctcgtctccgccggtcgtcgcccctagtctgacatcaggcgactgcacccnactcttcatatcatatatatatcctctcacagtgtctntatcctcacccccttctcagcacatactatacaacatatattagccgctcgactcgcctctctactattctccactcgtcgccccgcagtccactatgactaaatgcttctccacacacagaccttcactcatgtcaatgcaatcctcgatactcactcgcacactttnnnntanttaacacataacacctagtctctgcatagataacattacccc

SEQ ID NO: 12752 - DNA, 436 bp, Glycine max
  Coding DNA Sequence Number=SeqID_2973
gggtcgtgtactaccggcgcccgagtttttccgcaccccttcatttccatgtagaaatccccgggccctcgccccacaccctataatttttttatgctcccattaaaccttcacctctttttttccctaaggcccccttataccaaaccctccccacatttgtccccctctcatcttcacttcccctcgaccctccctaaaaaaaaacaactatccacctactttcctaatttttttcaaagtataaaaacttcatcctatacactcatctacccttttccatatacgcctacgactggtccctcccgcttacttccccccgccccccccttctacttccccccgaaataccctagccgcctatagactcccaaaatttatccttatgaatctctcccaaaactaccacataccacctctcactggagcgggcggg

SEQ ID NO: 12753 - DNA, 533 bp, Glycine max
  misc_feature (70)..(70): n is a, c, g, or t
  misc_feature (77)..(77): n is a, c, g, or t
  misc_feature (256)..(256): n is a, c, g, or t
  misc_feature (385)..(385): n is a, c, g, or t
  misc_feature (498)..(498): n is a, c, g, or t
  Coding DNA Sequence Number=SeqID_2974
cggtggtcggatatacttgttacagagtgatatatcaggaagtggcgaatgtataataacacgggtgtgntagtganggtgggcgcggcgtgcaccgagtcagaccactatacaatacgctggtgatgcatacggatattggttctatgagttacatgtgtgtcttattatatgagaccacaatcatgacgagagacgtgtacggagtcatgacgatagatattacgtatatcggatcgtaataaatagatatatnatatctatattgcaataatcaactggctcggcgcgcttcgtcgcgataaccgtaggtaacgtagagaggaggtggtgcgtgggtgtgattcactactgatcgtgttgtttatagttagtcttttattantaggtgttaagtgtgcattagaagcgcatcttatcgccgcattccatagagtattaagagggtgtgagagtgtgttagaacaacactatgaggagcgaagagagaaacgggcncacgacatatgacgcggcgtgatagaaacacagtt

SEQ ID NO: 12754 - DNA, 558 bp, Glycine max
  misc_feature (292)..(292): n is a, c, g, or t
  misc_feature (417)..(417): n is a, c, g, or t
  misc_feature (491)..(491): n is a, c, g, or t
  misc_feature (526)..(526): n is a, c, g, or t
  Coding DNA Sequence Number=SeqID_2975
gctgcacacttccattagagactctacgccactctgtggtcaccgcacgcgacagcatagaatatacgaagaaggatcgacacagaacccatcgcgatgacgcgacgaagcaacgagaacacgcgacaacgagcaacgacccacaccgtccacaggtcgaggtggggcagctgcgacgtgacaccggagagaggagcatatgtgactgtgcagctaccacactacatctcacgctactaaccgctgatagagtatagcgcgccgcagctcgtgtctctcagacatcggtatnttccgtatcgtcatctgtcatcatactctccaccaccgcactcagctcgacacgctagacaacctgtacgacagtatactctctctgtcagcaacgtcgccgagatcagcgcaactcattctatnctggtcagtaatatacgcgcgcgctctgctgccactactgtgttgataggctatatcgtatgcacgctcacacncgctcgcccacacgccgactcttctcatgctatgntcttgcacagactcacgtagactgtgctgtat

SEQ ID NO: 12755 - DNA, 491 bp, Glycine max
  misc_feature (138)..(138): n is a, c, g, or t
  misc_feature (353)..(353): n is a, c, g, or t
  Coding DNA Sequence Number=SeqID_2976
gactgatattctcatacgcacatcgaagcgtaactatgatgaggtaaaggtatgattgacgctgtttggtatgattgattgtcctctcctctgttgattaacagcacatatcccagttgtcagcataggacgcgtatnattattattaattatatacaacagacaaaaacgaccatgagtacactggcggatgtggctcctgctgtggccgatgtctttgtgtgcgtatgaattcttacacacctctgctttagtgtaggagggtctacgtcagatgaatcgcttgctgctcgtcggtggtgtgtcagtaacaggatgagcgtagcggcgtgggagaggaaggagaaaaatangatatgatatctgtgcaagaaccacacccaaacgacggatgatagcagggttccacctaagtctcactatgtcgatggacagtagcacacatctgacggagagggggtagagatatagcgtggcggtcgatatcagat

SEQ ID NO: 12756 - DNA, 443 bp, Glycine max
  misc_feature (208)..(208): n is a, c, g, or t
  misc_feature (304)..(304): n is a, c, g, or t
  Coding DNA Sequence Number=SeqID_2977
ctctgttcggttttgagtcctctgatgtcactatctcgcgtatctctgttatactctataattcctacatctctttctcaccgcttaggagtggctcctctcttccccgcgtaatccttaatacacccccagacaatgcggacggtgactgccagccctcaccgttcatattctccgacccacctatcctgaagcttaatgcgttgtncgaagacattagacgcactgagataaatgtcctctgtcatcacatgcttggtctgccatctcatttgatattagtcactgatagccgtccattcancattacaacacacaatctaacagacgcgcctctcagcctgcatgacacagacccaccaccaacgatcgcacaccacgctctgcgatgtgcgccgcgggcggtgtggcggcccatgcttgtatagcttggtgcttgttat

SEQ ID NO: 12757 - DNA, 549 bp, Glycine max
  Coding DNA Sequence Number=SeqID_2978
agagcaccgcagcaattcgatcccaagcatccccccaccaacctcaccatcctcgtaccgcacgtccaggcagctaatcagtcaagctcaagcatccaagccggcctcggattgaaggcatccatccgggagggaggggaatggggttcgtgctggtgatctcgctgcccttcatattcttcaccatcctgctcggcttcggctgctacttcctcggcaagcacaagggccgcgaggagatgcgcgccggcgtcggcgcccagatctacggcacgccgctgccgccgcctggcgtggccgggcagtccccggggccgtacccggtcccggtcccgatgaagaaggagggccccgacgccgtctgatcggtcgagcttcctcctcctcctcggctggagcgttggtgttgtttgtttactgggtttgattattaccgtgtacatggagtcatttgttgctcgtttcttgtgtggtgtttactgtgaaggaggaagggatgttgatccggtgtgatgatttgtgatcacagttgcgtttctatgagatgcg

SEQ ID NO: 12758 - DNA, 573 bp, Glycine max
  misc_feature (117)..(117): n is a, c, g, or t
  misc_feature (212)..(212): n is a, c, g, or t
  misc_feature (242)..(242): n is a, c, g, or t
  misc_feature (268)..(268): n is a, c, g, or t
  misc_feature (389)..(389): n is a, c, g, or t
  misc_feature (408)..(408): n is a, c, g, or t
  misc_feature (410)..(410): n is a, c, g, or t
  misc_feature (434)..(434): n is a, c, g, or t
  misc_feature (442)..(442): n is a, c, g, or t
  misc_feature (462)..(462): n is a, c, g, or t
  Coding DNA Sequence Number=SeqID_2979
gcaccggctgtcgacagtattcgatgtgctctacaggctgtgtcgatcgatcgacgcagcatcggcgatcgtcgcgctgcagctgtgccgacagcgcactcagacagacgctcatgncgctacttggactcgataatcaccgtcgcagactgctctactcactacccgctactatcaccgtcacacgtatatcagtataataggacgatatngcgacatatcatagcgatttgctcagcctntgtgtatctatgtttgactcgccgcnaacgcgcgagcgtcactatagatgtatacagcgtgtgcgtcgttcaacaactaataattgacacactagtctcatgtctgcgagatacacaatctgtatacgtgagcgccagttattacgngatgtgagtgcgacgtcgngncgtgccgacagtgcacacaatgangatgcgcngcacagtctactcgactcangactacgcgacatcgagtgtactaaggcgttgagtgatatgcgactctcgtgtcgtcagctcgccgcgtaggtagatgtcgtctgcggctctctcatcactagtattacgt

SEQ ID NO: 12759 - DNA, 569 bp, Glycine max
  misc_feature (416)..(416): n is a, c, g, or t
  misc_feature (502)..(502): n is a, c, g, or t
  misc_feature (544)..(544): n is a, c, g, or t
  Coding DNA Sequence Number=SeqID_2980
gacattgatcggtaagagagccacaggagagaactcacggcacaagaagcgagcggggtgagaataaaggacgggggacaacgcatcaacgaccacagcacactcttggcgggtgtgctggcgtggaggaggggttaatactgctggcgtggtcaccagtagaatgggagaggaagccgcgctgcctttgttgtctatgatattatatttgtgtctctaaatagtggtgactagtggcagactaacacgttcatctgttgttttttcgtggtggtgtaggagaaggggcatagagggagcaagggcggtaataggagggggtagactggggtcactccctcgcgcggtccgcattcagcggtatcagaggtgcaggataaatggcagccttggcacgatcgcagagcaccagaagnagggaggaaaacactatcccctacaattagctacgccatttgggagggggggtggttctcatctacacactagactagggccgcgntccgctctgggggtattattaaatcgctctacactctttaanggctatctggcgtccacgagaatgg

SEQ ID NO: 12760 - DNA, 506 bp, Glycine max
  misc_feature (43)..(43): n is a, c, g, or t
  misc_feature (247)..(247): n is a, c, g, or t
  misc_feature (379)..(379): n is a, c, g, or t
  misc_feature (464)..(464): n is a, c, g, or t
  Coding DNA Sequence Number=SeqID_2981
taacgtggttcactgcacagactctcgcctagtagctagttgntgatatcacatctctggtcacgtgcgtacttaacacgattgctacaatacacaccacacatcaacatatgataccacacgacaacagagttagtaaatacctctacacatccaccacacacaaacatgagtcaatatacatgacattactgacagcacacctctcgcctcacacatactaatataccatcaacaataacgccantaatcattagtgcagacactctcacataaatagtttcgactgatgtcacaacatctactaaagaaataataatactaatactatatcgcgcacgctgtgtccgataccacacagcagcttctcctcacagtntacgtcaagtatcttgatcagtcagcgtgcacgtaccgctcacctacacgacgaggatgctgctctatatatcgtagatgtagtncactaacaacctcaaacacttctaacactcaactctctataa

SEQ ID NO: 12761 - DNA, 529 bp, Glycine max
  misc_feature (30)..(30): n is a, c, g, or t
  Coding DNA Sequence Number=SeqID_2982
gagtctcgcgtgcaggccagggtggtgcgncacacgcgccagagcgtcggagccgcgcgactgtcgacgcgtaccgctgcgctcaggtactggcccccggccccggcgtgcacgcgaatcgcgccagcgatccgcgcggccgcgcaccgtacacgcacaacgcgtacgcgcgagtgcggccggagatcgtatcgccggcgcggacggacgcaccgagtgtcacggcagacgtcgtagacggcgtgcggccggcgtcacgcacgcacagagcgtggtcgacacaaccgagccgcggcgagccgcgcgcgggaccgcgtcgtactgcacgggacgcagcgtagcgacgcgtggtcgcggagcctgagcgcgcgcggcgcgcgacgaggctctcgctcgctacaggggaggctcacaccacccgccacgcgcgtggagtgaggcgaggaagccgcggaatcgcctaccgcacgcgacactagctcggccgcgccgagctgagagcctaggctgagtgctagtctagcgtcgc

SEQ ID NO: 12762 - DNA, 582 bp, Glycine max
  misc_feature (57)..(57): n is a, c, g, or t
  misc_feature (79)..(79): n is a, c, g, or t
  misc_feature (247)..(247): n is a, c, g, or t
  misc_feature (284)..(284): n is a, c, g, or t
  misc_feature (314)..(314): n is a, c, g, or t
  misc_feature (340)..(340): n is a, c, g, or t
  misc_feature (361)..(361): n is a, c, g, or t
  misc_feature (375)..(375): n is a, c, g, or t
  misc_feature (379)..(379): n is a, c, g, or t
  misc_feature (403)..(403): n is a, c, g, or t
  misc_feature (471)..(471): n is a, c, g, or t
  misc_feature (507)..(507): n is a, c, g, or t
  misc_feature (555)..(555): n is a, c, g, or t
  Coding DNA Sequence Number=SeqID_2983
gtccgttcgcagcagtagcgatgctgtactctgctgacacagcacacgtgagctaanctacactaaacgcagcgactcngctagtcgactcatgtctcgacgtgctatgcgccgtactgacgctctatgagactactagcgcagactgacgtctctactctcatacgctactcctcattatctccgtccgactctcccctccatcaatagcagtcactatgactacgtgtttgtaatacagtatcantctatctatgatacaaactcagacatcacgcgctcangcccgcgatacactcgccgccgacgccgcngccccggtctcgctggacgcgcgcgntgcaccggactcacccgactngctgtcgatgcttncatncactactcgatgatcacactctgncgcgacatctgctgtactcatgtcactcatcatgatgatcttactctcctatactctgtccagtattntgcgatacaccacttctctacgtctgtctatcatcnctacactcgctagactaactcagtctcacacagcacgtcacgctacgngcctcgttagtgcgtcagcagctcgtg

SEQ ID NO: 12763 - DNA, 525 bp, Glycine max
  misc_feature (63)..(63): n is a, c, g, or t
  misc_feature (121)..(121): n is a, c, g, or t
  misc_feature (152)..(152): n is a, c, g, or t
  misc_feature (155)..(155): n is a, c, g, or t
  misc_feature (210)..(210): n is a, c, g, or t
  misc_feature (234)..(234): n is a, c, g, or t
  misc_feature (327)..(327): n is a, c, g, or t
  misc_feature (378)..(378): n is a, c, g, or t
  misc_feature (390)..(390): n is a, c, g, or t
  misc_feature (463)..(463): n is a, c, g, or t
  misc_feature (469)..(469): n is a, c, g, or t
  misc_feature (471)..(471): n is a, c, g, or t
  Coding DNA Sequence Number=SeqID_2984
atgccactcgcatctgatagctatgcgtagatgaaacgatcgttatgtatgatcatggtatcncctcctccagtacggccgttcctgtcgtagagaggagcagcttctatactctcattgnttgtgtatcttattgtgaactactgtactcnacntctaggctcatggtgagcatatttcatatcttacactgattatattaagctacanactaacttctcagcggtatgtcanaagtctatctgttccagctaattattactctatatactagcgacggtgtgtgccacgcgcgtgtgtgtggagatagcatgcgagtatagagancgagttccgtatagagagcagagtgcatagtagagaagtaggttattaganagcatggctacnatatatgcgcatattgtcgtgcttcaagcgttcagcgagacgggctgtcggccgagtgcgagtcctagtgtgntgttgngntatgtaggattagtattatgtgttgttgtatcgctctccacttatctatcatat

SEQ ID NO: 12764 - DNA, 490 bp, Glycine max
  misc_feature (38)..(38): n is a, c, g, or t
  misc_feature (64)..(64): n is a, c, g, or t
  misc_feature (68)..(68): n is a, c, g, or t
  misc_feature (70)..(70): n is a, c, g, or t
  misc_feature (87)..(87): n is a, c, g, or t
  misc_feature (162)..(162): n is a, c, g, or t
  misc_feature (165)..(165): n is a, c, g, or t
  misc_feature (245)..(245): n is a, c, g, or t
  misc_feature (282)..(282): n is a, c, g, or t
  misc_feature (289)..(289): n is a, c, g, or t
  misc_feature (296)..(296): n is a, c, g, or t
  misc_feature (308)..(308): n is a, c, g, or t
  misc_feature (315)..(315): n is a, c, g, or t
  misc_feature (325)..(325): n is a, c, g, or t
  misc_feature (331)..(331): n is a, c, g, or t
  misc_feature (345)..(345): n is a, c, g, or t
  misc_feature (347)..(347): n is a, c, g, or t
  misc_feature (355)..(355): n is a, c, g, or t
  misc_feature (383)..(383): n is a, c, g, or t
  misc_feature (394)..(394): n is a, c, g, or t
  misc_feature (444)..(444): n is a, c, g, or t
  misc_feature (447)..(447): n is a, c, g, or t
  misc_feature (452)..(452): n is a, c, g, or t
  misc_feature (458)..(458): n is a, c, g, or t
  Coding DNA Sequence Number=SeqID_2985
gcgcagctcgtactactgttataatatattagacatantgccgcgccgcttcactactctcccnaccncngcgcagcgagatatatncgatcacgactacatatagtcatcatatacagcacactagacgactctatcgtgctacctgtccgtatgatatanggnatcatcgtctactctagcgctctgtctctgctagacgactatcacattcacactgtatgtaccgtcgtttgcaacgtcanctgatacacgcatatctagtgactagactgacgtatntatcacntcctacnactatatgacantatgttngtatcatgcnactgantgacgacgactcantnctcatgcnatatgatcgtattgacacacgtgtgaangttacagtcgntgacatatataccaatcaaactttcatagtagtctattagtccttcgagnctntcacnatatanagtaatctacgctgcatagcagacgcttctac

SEQ ID NO: 12765 - DNA, 596 bp, Glycine max
  misc_feature (28)..(28): n is a, c, g, or t
  misc_feature (77)..(77): n is a, c, g, or t
  misc_feature (126)..(126): n is a, c, g, or t
  misc_feature (129)..(129): n is a, c, g, or t
  misc_feature (141)..(141): n is a, c, g, or t
  misc_feature (160)..(160): n is a, c, g, or t
  misc_feature (217)..(217): n is a, c, g, or t
  misc_feature (219)..(219): n is a, c, g, or t
  misc_feature (264)..(265): n is a, c, g, or t
  misc_feature (298)..(298): n is a, c, g, or t
  misc_feature (303)..(303): n is a, c, g, or t
  misc_feature (339)..(339): n is a, c, g, or t
  misc_feature (375)..(375): n is a, c, g, or t
  misc_feature (378)..(378): n is a, c, g, or t
  misc_feature (393)..(393): n is a, c, g, or t
  misc_feature (405)..(405): n is a, c, g, or t
  misc_feature (407)..(407): n is a, c, g, or t
  misc_feature (473)..(473): n is a, c, g, or t
  misc_feature (486)..(486): n is a, c, g, or t
  misc_feature (494)..(494): n is a, c, g, or t
  misc_feature (531)..(531): n is a, c, g, or t
  misc_feature (533)..(533): n is a, c, g, or t
  Coding DNA Sequence Number=SeqID_2986
tagaacatagtttagcgcgacgcggagngactggagcacggggtggcgtgagcgaccccaggagtgtatgcgttacnacgcggctgagcctagcacacgcggcttggcgtcgtgtgcttgaggggngcntcaccaccttgnatgacgccgtcgcttgtgngtgtattgctgtctacagtcatatccggtgccgatatgtgacagacactcgtgtggngncggtgttgggcggactggtctcccgcgcgtgtgtttgcgccgcgnnggcacgggtctttctccactgatcgcgccgttnccctntctttattgacgcgctcgccggccgcgtgtgtgctntcgcggtgcggccgtggtggcgcagcaaaggagttnttnatcagagccgacctnaagagcgcatcncntgcgcgcagcgaggtcgttgtcactccggcctgcctgttgtgtacctggccaggtagcttgcttcntttcctttgtggncatgtatntgtttgtgcacgcctctgcggagtgggtagatactgncntcaccatttacgatggttcagtagcaggcggagagacctgagatcactcctgatagactgtac

SEQ ID NO: 12766 - DNA, 407 bp, Glycine max
  Coding DNA Sequence Number=SeqID_2987
tagaagagtcaggagcgcgtcgaaagacgacgcgaatgcccgaacacggtgaacaaacgagacgcaaacaacaataacctacataacactctttccaccaacacaccgtcgcgtacgatgtattttagaatatctacatttctgcattcgcgcttgctctttattcgagtatcatcatttctcgctgagcgtaggagggtgggtcgctggatctatcggctgtcctgtctggattgcttttgtcttttagtggattgttaatatggtatgtctcgtgagttatcttgtgtaccttcctactctcaccccaacactaagacatgcgccgtcctctcatccagcctatcacttaattccaaactgacggcccctgcgctgtctcggccaacgacggagagacattctat

SEQ ID NO: 12767 - DNA, 286 bp, Glycine max
  Coding DNA Sequence Number=SeqID_2988
tcaggttccagctcttgctcctacgacgccagaagctccctctacatctccgtcgtctagcccgcctctcccggcgactgatggccctggaccgagcgtcgaagggccaggaccttccacagattcgaatgaccagaatggagcaagcaagacagtttcaagcttggtacttggatctgttctcgtttggtttatgatctaagcgtgggagcctttcgctcggtgttccttgcatttgttttcatgttgatgtttgtttgttccattgttattactttcggaaccg

SEQ ID NO: 12768 - DNA, 600 bp, Glycine max
  misc_feature (36)..(36): n is a, c, g, or t
  misc_feature (85)..(85): n is a, c, g, or t
  misc_feature (333)..(333): n is a, c, g, or t
  misc_feature (373)..(373): n is a, c, g, or t
  misc_feature (379)..(379): n is a, c, g, or t
  misc_feature (437)..(437): n is a, c, g, or t
  misc_feature (481)..(481): n is a, c, g, or t
  misc_feature (553)..(554): n is a, c, g, or t
  misc_feature (556)..(556): n is a, c, g, or t
  misc_feature (559)..(560): n is a, c, g, or t
  misc_feature (562)..(562): n is a, c, g, or t
  misc_feature (572)..(572): n is a, c, g, or t
  Coding DNA Sequence Number=SeqID_2989
gcacatcctcatcatagaacatatatgggtatgganggaggtcggcgacagagaggagatatgagacagagcatgtcataggtgntacgagcaaacaaagtatctacatagtaagagagatgacacaccggctatatactaagcgtgaacacggagagtacatcgacagcacgcgctccacctggaagtaagtcacagcgaggatctgaatctacggtctactgatatagagaggaagcatgtaccgtgacagggcgctgatttagtgaagggagtatagctactcgacagttacacgcccctagcgctccaactcctactcacttatatatnaagtgaagcagtgagacttcactctctccctcatagtagnctagcngagatatgtaaaaatagcgccggagtagcactgcttcacagactacactctggtcgangagtctacgaggctgtggtgttcatataccaacttatcttcgtngctctcgtcgctctcctgcacactgagagaaacgcacacgtgatatatacatatactataaaattctaggannanggnngnggggctgcgngggggccggtgagcctgttagtaagtca

SEQ ID NO: 12769 - DNA, 241 bp, Glycine max
  Coding DNA Sequence Number=SeqID_2990
gcgagaggcagatatggcgatacatgctcgcaatgatgttcttgctgtcatgaatcatgaaatgaggacacgcatgcatgcagttatagcgttgtcttcacttcttcttgggactgacctgctccctgagcataggtgtatgattgagacagtgcttaggagtagtcatgtgttggctacacttcattcgcgatgttctaactctctttcgactttatctcgcggtctggactttatgtat

SEQ ID NO: 12770 - DNA, 461 bp, Glycine max
  misc_feature (30)..(30): n is a, c, g, or t
  misc_feature (35)..(35): n is a, c, g, or t
  misc_feature (59)..(60): n is a, c, g, or t
  misc_feature (87)..(87): n is a, c, g, or t
  misc_feature (107)..(107): n is a, c, g, or t
  misc_feature (121)..(122): n is a, c, g, or t
  misc_feature (126)..(126): n is a, c, g, or t
  misc_feature (143)..(143): n is a, c, g, or t
  misc_feature (153)..(153): n is a, c, g, or t
  misc_feature (162)..(162): n is a, c, g, or t
  misc_feature (166)..(166): n is a, c, g, or t
  misc_feature (169)..(169): n is a, c, g, or t
  misc_feature (182)..(182): n is a, c, g, or t
  misc_feature (203)..(203): n is a, c, g, or t
  misc_feature (208)..(208): n is a, c, g, or t
  misc_feature (254)..(254): n is a, c, g, or t
  misc_feature (268)..(268): n is a, c, g, or t
  misc_feature (297)..(297): n is a, c, g, or t
  misc_feature (305)..(305): n is a, c, g, or t
  misc_feature (314)..(314): n is a, c, g, or t
  misc_feature (329)..(329): n is a, c, g, or t
  misc_feature (331)..(331): n is a, c, g, or t
  misc_feature (342)..(342): n is a, c, g, or t
  misc_feature (372)..(372): n is a, c, g, or t
  misc_feature (379)..(379): n is a, c, g, or t
  misc_feature (382)..(382): n is a, c, g, or t
  misc_feature (404)..(404): n is a, c, g, or t
  misc_feature (428)..(428): n is a, c, g, or t
  misc_feature (433)..(433): n is a, c, g, or t
  Coding DNA Sequence Number=SeqID_2991
aaccgatgagactatgatttactatcaatncacgnacggatgatagtagacttactcannatcgggtatcatcatcaccatgaattntagcagacgacatcaatacntagatgtagctgtnncatnaacgacgtatatgttgntactgtcaantcactaacntacnacntacgtagtaaacngagctatgtaatcaagctgtncgaangatgcagatcgataggtcaatgacgtcagactacccgatgatcagngatgtaggatacgncactatactgagatagaattatgaagatncggatatncatcatacngctcacccgcgccgntngtcgataatcntatcggactgctcgactactgatgcactcngtacagnacngacagcaagctaataaatctantcagtgcgtgatggtacgagcagntaatncgtagtgactgccggacgagtggctcat

SEQ ID NO: 12771 - DNA, 551 bp, Glycine max
  misc_feature (136)..(136): n is a, c, g, or t
  misc_feature (167)..(167): n is a, c, g, or t
  misc_feature (184)..(184): n is a, c, g, or t
  misc_feature (247)..(247): n is a, c, g, or t
  Coding DNA Sequence Number=SeqID_2992
acggtgcctcgtacgtgtgtgtagaggttgtcagctacttctccgtcaacagagcgtatgcgcgaattcgtcatctcgcgcgtcgagcttctcactccctacgtcgtcgtccacccgcccacgcatcattctcggncgactatacagcacattctgccgctagcgtnttagaacgctctctcgncgcgactatagctatatcacactatctacacgttctattatacatcccactactgtcctagtncaactcctctcacactgctcgtgagtgcatcgctcagtcgcccaacgtgtagccaccactctgtgcacaacattcacggatgtgtcgcgactattataacatgacgctcgtgacgagcactctatacataaccctatagcgactctgactacacacgactcgtgactctgctcgatttagtccgtctcgacgcatttactctatcacgtatacatggcatgacttgcatccttacctcatcgccatcggaggatcgacttaacgccctacattcctcctgatccctatggctacgttgaccaaa

SEQ ID NO: 12772 - DNA, 546 bp, Glycine max
  misc_feature (67)..(67): n is a, c, g, or t
  misc_feature (191)..(191): n is a, c, g, or t
  misc_feature (215)..(215): n is a, c, g, or t
  misc_feature (234)..(234): n is a, c, g, or t
  misc_feature (236)..(236): n is a, c, g, or t
  misc_feature (242)..(242): n is a, c, g, or t
  misc_feature (281)..(281): n is a, c, g, or t
  misc_feature (320)..(320): n is a, c, g, or t
  misc_feature (331)..(331): n is a, c, g, or t
  misc_feature (426)..(426): n is a, c, g, or t
  Coding DNA Sequence Number=SeqID_2993
gctagattcaagatgctcgtgtgctcgtggtaatatcggagtctgttgtgtgtgacgtgatgatcangacacgcgtactacggctgatgcgtcactcatcgctgctctagcggacgctgcatctgcgcttattcgtatcgcgtacgagtctgcttctgatctatcatgctggctgtgttatgctctcgcgngtcgctgccgcacgcggtagttantcgtgtgcttctattatcngnctgtgntcactgtgactttgtgtgatgttatctgcacttatatgngttactcattatgtcttgcgtcagcatctcgtactctcncgttgttactntgctgtctgctaggcgtgtcgatctgctacgtgcgtatagtcttctctctccatagtcgctcgtgtcgtcgcatataacatcgcatgtgcgtganctgcgcacacgacgcgtggctcgatcgctgtggcgttgaatatctatctgcgctgatcatcgtgatgacatgacatgactgtatggtacagcggagcatgtctcagtccactagtgcaga

SEQ ID NO: 12773 - DNA, 583 bp, Glycine max
  Coding DNA Sequence Number=SeqID_2994
cacttctcaactcggtaaatacggaaaaattgaaggaaagaatgtattttactggtttcagaaccacaaagcccgcgagaggcagaagcagaagaggaacaacttcatcagcttaagttgcctaagcagcttcaagaccactaatatcaataacgcaagtgtaacaacgaagacaacaacatcgtcaaatgacgtgatcaggagagactcaatggttgagaagggggagttagtggaagaagctgagtacaagaggacatgtaggagctggggatttgagaacttggagatagatagcagacgaaacataaatagtagtaaaaatgctacaatggcaactactttcaacaaaatcattgaaaatgtaacgctcgagcttttcccattgcaccctgaaggtaggtgaagaagatgaggaagagaatgtggaattcttatgtagatctggtttaggttcagactaagtatttggtatctagaaattcaatattaatataattaaatattagaaaataacagaatctacttaagaattcccttgtactctgcgaatctgatgtacactatgtacatttttattgct

SEQ ID NO: 12774 - DNA, 147 bp, Glycine max
  Coding DNA Sequence Number=SeqID_2995
ccttgtccctggcaatactatgacatggccacgattggctaaaccctgctttacccagcttaatcggttagaacctcatgcttgtttaaacaattggcgtaatacaaaaaaggcccttgcccgatcgtccttcttaacacatatgca

SEQ ID NO: 12775 - DNA, 597 bp, Glycine max
  misc_feature (197)..(197): n is a, c, g, or t
  misc_feature (473)..(473): n is a, c, g, or t
  Coding DNA Sequence Number=SeqID_2996
attgtatcgcacaacgtatcgccttgctcacctgcatccacccctttcacgtcccgcccccgctctactagccttgcctggcggcatcctcctcttcttctgcccgcgcctccctccccctccgctctactcacgcctttcttctctcccattatacgtttttgaagctgtacttacaatcgccctcctcctcatcncctgacaatctcaccgtacacccactcgacctcctgtacaaccttctacaacccctcgactactcacctcgcactccaccgcgacatacgcggaacaacctcacacactatcatgtccaacgcgccacggcagtacgctgtgttcatatcttcacgtcatctttactcgagagggcagtaccagactcttacgttcccgtctcagcaccatacaccgacacaagcagagatcttatgccacttgaacacctcacatatgcatctactctgaaatcnttttgtagcggatagagcgtgaccgttcctctccatatgccggccagcacacacacgactgtccgtgcagagcctgcacaacgacacacaaccccaaacgtccgaggcgctggacatgcgtcac

SEQ ID NO: 12776 - DNA, 387 bp, Glycine max
  Coding DNA Sequence Number=SeqID_2997
tagccaaaatactctgttaatcttctctgtcttatctctttatctctctgcctcttgcatttgcaggttgtcccagagaccttggaaccaagtcttcaactagcagccgccgtgcttgctcaggtaactatcatgttatttgagcagatatattgtccgaatgaactttttaacgtcttagcattttattattactctcacctgatgataacaacaccatttattgtggtaaaatattatgttcgtttcttgttgtagctgaatctgtcacattgcctgaacttttgtttattttctcttcattgcgtaaataatttacagagtttctggttaatttttctcagaaatagtatgagtctacttttgctctttatgccatggtaaaat

SEQ ID NO: 12777 - DNA, 485 bp, Glycine max
  misc_feature (80)..(80): n is a, c, g, or t
  misc_feature (87)..(87): n is a, c, g, or t
  misc_feature (92)..(92): n is a, c, g, or t
  misc_feature (104)..(104): n is a, c, g, or t
  misc_feature (201)..(201): n is a, c, g, or t
  misc_feature (206)..(206): n is a, c, g, or t
  misc_feature (208)..(208): n is a, c, g, or t
  misc_feature (243)..(243): n is a, c, g, or t
  misc_feature (290)..(290): n is a, c, g, or t
  misc_feature (356)..(356): n is a, c, g, or t
  misc_feature (385)..(385): n is a, c, g, or t
  misc_feature (394)..(394): n is a, c, g, or t
  misc_feature (447)..(447): n is a, c, g, or t
  misc_feature (454)..(454): n is a, c, g, or t
  Coding DNA Sequence Number=SeqID_2998
tacgatgagcgtgtgctgtgtcagtggtggggttgtacatacgcgagcctgcacatcatgcgatatagcactactccgancgcgagncgtgncggtggtgtatnggtcgcgttgtgtgatcgtgatgtcgtgtcgcgatgactatcacagccgtacacacaacatgatagtgcagctgtcagtgtactcactccatatacnaacananagagagagtgctggagaccgcacgtcggagtccgnagagtagagacgtgtacagtagttagacataggtataaggctcaganggagagatggagttcgtggcgcgacgcttataggatcgtgcgcatgctgtgcgcactatctccatntctgcacacgcctgcatatcacatagtanacacgtagnatcacgcgctacttgcatatagtgtgccatctgcctgctgtctcgactactantctgttncctcacacaacgcacctctacacgagtgtaa

SEQ ID NO: 12778 - DNA, 560 bp, Glycine max
  misc_feature (175)..(175): n is a, c, g, or t
  misc_feature (245)..(245): n is a, c, g, or t
  misc_feature (279)..(279): n is a, c, g, or t
  misc_feature (321)..(321): n is a, c, g, or t
  misc_feature (324)..(324): n is a, c, g, or t
  misc_feature (369)..(369): n is a, c, g, or t
  misc_feature (441)..(441): n is a, c, g, or t
  misc_feature (470)..(470): n is a, c, g, or t
  Coding DNA Sequence Number=SeqID_2999
gccgctgcgagctgtgatttatcgaatgttcgcgttataacggagtcgtggctatcctagcaatatccacttctccatagtcgaggagattcaatactcattgagccgcgagcagaaggaggtctcacatctaagtgtctctcatcgcacaatgagtagcgtgttccgcttattngagtcggattgttcgtcgatcctctcctgtgcgcgcagctgcactagtgaataggataacgcaggatctncgtatcgtgtcatattatgtagcgtacctcttcnatgttagtgtatatgtcaattgacagacgaccgcgtcgtgcngcnacgtatgagtcgtgcactgtattagcgatctatttagcttgtggntgtagtgtgtcgttagtcggtctattataaatagatgcatatatcctaatttacatgatactgatattgtcncaccatgtggtacacatatagtatgaatnatatatgctctctctcactcactacttatatatactgcatttatgcctaccgcgcgtgataagagaggaggtgcgagtcatcaatgtagt

SEQ ID NO: 12779 - DNA, 489 bp, Glycine max
  Coding DNA Sequence Number=SeqID_3000
gggcctaaatgacctgacctaaactcccattacgttgcgtgggcgcttcactgccccgattttcccaggccggaaaaaaacctggtcgacgcccagctggaaattaatggaaacccggcccaaacgcggcgcccgcagaaagggcggcctagggcgtaacgtgggggcacccccctcttccgggctttccctcccgccctcactgggcaccccgccttgggcgcccaccgagaccggatcctcgtcatgcccccacaaagcccgcaaaaaccacgcttcacccgccacaacaggcgccccaacattccccggataacgcccaccaacaaaaggcccgggcaacaccacggcacgcgaaccgcccggcggcggatcccacgacggggcctcccccaccgccctcacgaaccctttccaaacacgccctcccactcccgcggcccatccctacccacgacccgccggctggaatcggtcccgctacctcgg

SEQ ID NO: 12780 - DNA, 559 bp, Glycine max
  misc_feature (103)..(103): n is a, c, g, or t
  misc_feature (196)..(196): n is a, c, g, or t
  misc_feature (227)..(227): n is a, c, g, or t
  misc_feature (271)..(271): n is a, c, g, or t
  misc_feature (345)..(345): n is a, c, g, or t
  misc_feature (420)..(420): n is a, c, g, or t
  misc_feature (453)..(453): n is a, c, g, or t
  misc_feature (532)..(532): n is a, c, g, or t
  Coding DNA Sequence Number=SeqID_3001
gtttctgtctcatgttagctgccgtggtctctccctcatcgtctccactctctaccaccatatctatctatatcatacgtctcacactgacatatgagtattnatgtcgctatgaacgtcgtacattcacggagacagagaggttagagagaagcgtcgcgatattagtctgccgcgaacatgtatatgagctagntaccgatatgatgggcgtcacgactcgacanctcgcgctactgtaccgtgtcggcgagtgctatagtctagatcncgcgcgtggctactgagactgtactgctgataatatagtgtagtagcatcgtttgagcgtatatgccgatcatntatgatgatgcgatgcgattacgtattacacatatcgtgcgctacatgtcatctctgtgctcatcaatagtcctnatctccacacgccactgcgcatgcttgactatntgtctatactgcgagctatgccttcccgtcgatatgtatagcatgtatgctattacgcacactgactgacgctgaactngcacgtcgtgtagatatccgtgtgtgc

SEQ ID NO: 12781 - DNA, 240 bp, Glycine max
  Coding DNA Sequence Number=SeqID_3002
ggtgttgatccgtcctgagaagcgccgctcatatctgcgctgagcaacaatcatttaaatttgacgtacagcatgagccccaacccccatcctgattacattggtgagattgcagagttgcaacacaggtatggggcaaaggtcagtggttcattaatagccaagccatgagtccattgaattgatatctattatagataaattgaaatattaatgtattatagtcatacagtgtacaaa

SEQ ID NO: 12782 - DNA, 560 bp, Glycine max
  misc_feature (93)..(93): n is a, c, g, or t
  misc_feature (189)..(189): n is a, c, g, or t
  misc_feature (211)..(211): n is a, c, g, or t
  misc_feature (227)..(227): n is a, c, g, or t
  misc_feature (326)..(326): n is a, c, g, or t
  misc_feature (397)..(397): n is a, c, g, or t
  misc_feature (455)..(455): n is a, c, g, or t
  Coding DNA Sequence Number=SeqID_3003
atactgtctacataagtctgcggcagtgtcacacgtggtataaagatagagtggaggatattatctaattatcacttgagccccactgctatngctcgacgcggagacgagagtcggactatgaacggcacgaggcagacaagacgcggagcgcgcggaaccaatgaatagagatgtgacgagtgagantcatacagagcggagagaaacnacaacaccctagcgantgtgactatatagaacctaacagagcgatgcagacggattgatgagggataagaggacaggagaagcgtacgcatacgacgaacgcgaagggctggcangtaatgcgcgatataagtagctgtatcacgatcttgcgcgtcgagtgaagatcaatgatagtatagagtgngcgtcgcagagacgacacatcgcacgacacatattattatctatgtgttattgtatgnagatgatgcgacaacgcaggtgtgtcgaacatgagttaagtcgtggcgcgactatacacaatgagacggcgattctcgcgtaacgcgcgcagtcgaatggtacac

SEQ ID NO: 12783 - DNA, 568 bp, Glycine max
  Coding DNA Sequence Number=SeqID_3004
gcatgccgcagtgcaactcgacgtgcagcgccgccaactttgccggagccgggccatgcggcgccgactgcagtccgactccgggatgctcgggctgcctctcctactaccaaggcaagtgcatgtcggggtgcttgagggcgtgcaaatcccaaacaccgggtgcatacgactgcgaaaccacctgcaaaggcaattgcagcaaccaaagtagcttgtgcggagtcgtctgcggcgagtcgaagacgtgcaccgcctgcaaggacaactactcccgtgggtgcacatcctgctgcaccgcctactgcaagtgccactgcgtctagctagctccatcgattcaaggttttagattcctctgcaatgtaactaaggattctgctgctcactcatcggcgcctcaccaacgacccacatgtcagtgaaataagggtgccgagtgcaaatccttaattacgtgctataaggttgtgaaacttaggagcttcattttcttcaccaaataatcattaggggcaacatgttttccctttagcatcttgataggttttaccattgtgttcttaat

SEQ ID NO: 12784 - DNA, 589 bp, Glycine max
  misc_feature (276)..(276): n is a, c, g, or t
  misc_feature (498)..(498): n is a, c, g, or t
  misc_feature (518)..(519): n is a, c, g, or t
  misc_feature (521)..(522): n is a, c, g, or t
  misc_feature (535)..(535): n is a, c, g, or t
  misc_feature (557)..(557): n is a, c, g, or t
  Coding DNA Sequence Number=SeqID_3005
gtcgatcatgtgcaattatccagaacaacgcgctgtcacacaaactagacacacactcgcgccgcaacacaggtcgtggacacttatcatttatagatcggcctgcctgcacagccgtcccacgccgcccaacacgcggcgccgacgccatacgcgcgcaaccacacctcgctctgcacccacgccgtcgaagctgacacatcactcttcatcgcacctcagaatatgatacatatattatttattgggcatgtactatcgttgatatactatctnctgtatacaaaaattagctgtgtgctccataattggtaagtaatgatgacgtgtgacgacgtgcttcgttgggtggtagggttatggagtggggtcttagagagcatgtctctgagtactcgcttatgtgtcgccctcgctctgcgcgtcgagcgcctcacacactaatgataagcgtgtctttcataagacctcatactcgagtgttgtctgcgtgtttgnggtgaggtgtgaacaataannannaacgtgatggcgngccgtgcgcgccgcgtcgccgntgccggcacgcgcgagcgcaagtggctaacat

SEQ ID NO: 12785 - DNA, 574 bp, Glycine max
  misc_feature (56)..(56): n is a, c, g, or t
  misc_feature (185)..(185): n is a, c, g, or t
  misc_feature (262)..(262): n is a, c, g, or t
  misc_feature (268)..(268): n is a, c, g, or t
  misc_feature (326)..(326): n is a, c, g, or t
  misc_feature (366)..(366): n is a, c, g, or t
  misc_feature (370)..(370): n is a, c, g, or t
  misc_feature (389)..(389): n is a, c, g, or t
  misc_feature (458)..(459): n is a, c, g, or t
  misc_feature (497)..(499): n is a, c, g, or t
  misc_feature (502)..(503): n is a, c, g, or t
  misc_feature (527)..(528): n is a, c, g, or t
  misc_feature (531)..(532): n is a, c, g, or t
  Coding DNA Sequence Number=SeqID_3006
agatcatcactgtgacacatagcgccacgcagaggcagtgcgcgcgcgcggtgagncgcggagagggagatatcgcgatgtgtctggcgatagctgggagagcatagcagagcgtagagtgcgagaggagtagagaacgagcaggtggtaggtgaggagagaagatgtgagcaggaggatacatntggaagataagtggcaccaccgcacacccgcctcacaccctctcactccccagcaccgctcacgccccactcgctgnccgtgnctctcctcgtcagccgcgactacacgcgcagtcgagaagagacaacagaggtgagatnacagtgttagcgagaataagcgtctccaacaccccactcntgtnggcgacggcgagcagcgcngagagcgacaagccacgcgcacaccgtccctccccgcagcgcgctgcgacggagcggcagcgcaagagnnatgaacagaaacttcgcctaccctccctccgccggcgnnntgnncgaacaatataatataaattaagnnatnnatattccgcacgcgcccagcgactccgcacggacgtcacaac

SEQ ID NO: 12786 - DNA, 582 bp, Glycine max
  misc_feature (29)..(29): n is a, c, g, or t
  misc_feature (206)..(206): n is a, c, g, or t
  misc_feature (208)..(208): n is a, c, g, or t
  misc_feature (220)..(220): n is a, c, g, or t
  misc_feature (222)..(222): n is a, c, g, or t
  misc_feature (254)..(254): n is a, c, g, or t
  misc_feature (308)..(308): n is a, c, g, or t
  misc_feature (508)..(508): n is a, c, g, or t
  misc_feature (531)..(531): n is a, c, g, or t
  Coding DNA Sequence Number=SeqID_3007
acattcaaacttactcctctaacaactancatatattcacatattgttcgatcgttcgccacctcccactctcattcgatgtcgcctgctcacacacttcgtctcagcgctacaccaatgcatgcgctcagacgaacatgccacgcactctgctctaccgctcaccctcaccacccatccactgtctcatcagcatattactattncnaacagattttancnctgactatccatctttcgcatacctgtctccntgtctcttctcacgcactactgtgctaacacgtctaactagatctgctcaccanatgagcatagaccgcacggacgtacacactatacccactatcgcgaacacactgctcctcctcatcacgttacacctacgtcagacactgctctcctagatatatacagacagagatagacataatatccactcacatcacaccttacacgtcgatattcgcttcgacctcacgcactcacatcatactagctgacatcncgagagagcgcatcttatatacntcgtctatactcacgtagtacataacacgtacattgcgtactatctcacgt

SEQ ID NO: 12787 - DNA, 187 bp, Glycine max
  misc_feature (131)..(135): n is a, c, g, or t
  Coding DNA Sequence Number=SeqID_3008
ctgtgcgtctgatgtcaagggcgatggtgaacttgatattagctataagctgggatctccattcaaaccatatggccagcttgtacgggattttcctgcagcaaggtttgcatgctccgcatacttattgnnnnnatacagaatatgtagctttctaaacttgagtaagtgtgacattgggactatc

SEQ ID NO: 12788 - DNA, 547 bp, Glycine max
  misc_feature (34)..(36): n is a, c, g, or t
  misc_feature (41)..(44): n is a, c, g, or t
  misc_feature (78)..(78): n is a, c, g, or t
  misc_feature (80)..(80): n is a, c, g, or t
  misc_feature (130)..(130): n is a, c, g, or t
  misc_feature (134)..(135): n is a, c, g, or t
  misc_feature (174)..(174): n is a, c, g, or t
  misc_feature (177)..(177): n is a, c, g, or t
  misc_feature (184)..(184): n is a, c, g, or t
  misc_feature (238)..(238): n is a, c, g, or t
  misc_feature (257)..(257): n is a, c, g, or t
  misc_feature (269)..(269): n is a, c, g, or t
  misc_feature (340)..(340): n is a, c, g, or t
  misc_feature (364)..(365): n is a, c, g, or t
  misc_feature (380)..(380): n is a, c, g, or t
  misc_feature (393)..(393): n is a, c, g, or t
  misc_feature (403)..(403): n is a, c, g, or t
  misc_feature (417)..(417): n is a, c, g, or t
  misc_feature (421)..(422): n is a, c, g, or t
  misc_feature (440)..(440): n is a, c, g, or t
  misc_feature (472)..(472): n is a, c, g, or t
  misc_feature (490)..(490): n is a, c, g, or t
  misc_feature (498)..(498): n is a, c, g, or t
  misc_feature (522)..(522): n is a, c, g, or t
  Coding DNA Sequence Number=SeqID_3009
taccacagtccggagctcagatattttgtatccnnntcctnnnngcgcccgacaactcaacaatcatctccacccctngntcttgcatccttctcacgcgaggaaatcgagataatctactgtcttgtcngttnngaaggtgataataccacttgacaatgtcctagcactacngtncactatnagttgttaagacccaccctcgctaattctaggtccctgactcattgcttcactntggtgaccagccggacacnccgtgcttgccnccccgataacacccaggaatgcataattttaaaataatacatagttgtgttctatatagcatatctcccgnacgtcactacatgcgtagtgctcnntgaagtagaaagatnctgtagcacagcnagaacggatnatagagatgtagcnacgnncgcgtgccagagagtaancacactctccacaccccatcaacaaaccaaancattacgtaaaattatanacttgtanataatcgtcccgtaacaacacggncgccgagcttttatgttaacaaata

SEQ ID NO: 12789 - DNA, 460 bp, Glycine max
  Coding DNA Sequence Number=SeqID_3010
gcgccgcctacgttttattcgattaccctgacccgaacttcatgagggggggtggctcccagggttaccccaaacttgcgccccttttattggcggggagactccgtcatacttcacccccgctggctccccccctgggccgcggcccgctccttactatacaacgcgcgccgcacccatcctgccggaaaaatagacccccggtgcggggtatcgctgacgagctctctattcgtcctattttgcgccgccccttcccgccacaccattttcaatccgacgtccgccgccccttacacacgcgcgaaaaacgggcgcccgcccacccaccaagccggggccccttgtcgcacagactaatgtagcactcaacacactatacgatgcgctcaactcgcgcacacttgtcaaaagcagcctcaagaacacccgccgtgtcacagactgtaccatatgcagc

SEQ ID NO: 12790 - DNA, 561 bp, Glycine max
  misc_feature (361)..(361): n is a, c, g, or t
  misc_feature (393)..(393): n is a, c, g, or t
  misc_feature (397)..(397): n is a, c, g, or t
  misc_feature (402)..(402): n is a, c, g, or t
  misc_feature (427)..(427): n is a, c, g, or t
  misc_feature (499)..(500): n is a, c, g, or t
  misc_feature (502)..(502): n is a, c, g, or t
  misc_feature (511)..(511): n is a, c, g, or t
  Coding DNA Sequence Number=SeqID_3011
ccatgctctatcttcgcagtagtacccactcccctactaaccaccataccagcgtatcctagtactacctctactcccttctgcgtcctcttccattgtgctccttactctacccttcctgccttcccgcgttccctcttgctactcttctctcccctctccttctttctttctctctctctttatccgtacctagcttctcactactctattcatcaatatttcatctccccagaaaacatctctctcttccccttctccaacctcccacgcgccacgcccccctgggcagtccgctcctccacctctcctctcccctcctacccatctcccttcctagccatatcagattcccctcccnctggggggcataatatttcgtaatgttctctntttntcatnaataaagacgaggttttatatactnaagtaattctttccttttgtgggaagaaaaaatctttttctctcctctctctcctcttattttttagtaggnncnttcctttcnttccgtcctttagatcttccactcttttgtttgtaactctcccgtcgcct

SEQ ID NO: 12791 - DNA, 354 bp, Glycine max
  Coding DNA Sequence Number=SeqID_3012
gtgatcaaaatgctggctcgagcgacggagctaacaaaatttatcccactcaggagggggagtctctgtcagggaaccgtggcaagagttccactgctcacgtctcccaacctttccatgagcaatcagtctgtgctaagagcaacgccggagaggccccacattttgagactcaagagggtgacagagagagtagaagcgctccatcaaagaggcgtcaccactccccaaatgaggcatctgttagcctcagttgagcaggctccaacaagtgcagatctttggcatgatcaacgcccatcttctgggtctggcagaagacgaatccataatcggctctgaagaggacatgaa

SEQ ID NO: 12792 - DNA, 244 bp, Glycine max
  Coding DNA Sequence Number=SeqID_3013
tcatctgtgtcacaacagcgcacacactattttgcacgcaggtgtacaacgaggggcgcccgggcgttgccccccttgataacaaaaacctgatattttttaggtgtcgccccttgaaaaagggcatcacctatgttaactccccagaactactctctttgatggcagaaatatttttcttctacatcaagctcaagcatgagacaacatgttattttatatcatatagctgtccttatgctgg

SEQ ID NO: 12793 - DNA, 390 bp, Glycine max
  Coding DNA Sequence Number=SeqID_3014
ctacgcgatacgagagtgttcgttccttcccgaccgcggcggcgatcgatttctagggcaaactcctcgcccggtccgcgcgctcgaggcgagaggagggttcggctggtgagatggcggggcgcaaggagacggcgctcgacctggccaagttcgtcgacaagggcgtccaggtcaagctcaccggcggccgccaagttacaggaactttgaagggatatgaccagctgctgaacttggtgctggatgaagcagtcgagtctgaaagagagcaagatgacccattgaagctgtcaaccaagaccagacaacttggtctaattgtgtgcagaggcactgctgtcatgctggtgtcaccaactgatggaaccgacgagattgccaacccct

SEQ ID NO: 12794 - DNA, 528 bp, Glycine max
  misc_feature (47)..(47): n is a, c, g, or t
  misc_feature (91)..(91): n is a, c, g, or t
  misc_feature (191)..(191): n is a, c, g, or t
  misc_feature (234)..(234): n is a, c, g, or t
  misc_feature (386)..(386): n is a, c, g, or t
  misc_feature (460)..(460): n is a, c, g, or t
  misc_feature (463)..(463): n is a, c, g, or t
  misc_feature (485)..(485): n is a, c, g, or t
  misc_feature (493)..(493): n is a, c, g, or t
  Coding DNA Sequence Number=SeqID_3015
gtgctcgactgctcatggatgtgtgtgtagaccaggagcgctagcanagagataatacgcagtacggtcacggacacggacgactgcgctngcccgcgcgcgcgctactctgtgtggtcgtcgcagacatctctccgcccacaacgagtgtcatgcgtgtcatatcatgtcttgtacggatgtatgtttgngttcacgcgctcacgctcagcctacctcgttgatagtcgttcncctctatacacacagtatcaccatgagctctctgctctctgcgacacgtccgctgtctctgtcgcatgcctggtcgtgctgttatatagctcatgcgcacatcgtgcgacgcggcgcaccacagagtctgtgccgctctggatgcatgttgngtgacacgtcacttcgcgtgcgttcgtcatgagttgtgatagggaatagtagactaactgcacccccggcagcncanacgtctccgccgatgtgagtgnagtgcccncacatcgcgcgcactcacatactcgagacatctcg

SEQ ID NO: 12795 - DNA, 427 bp, Glycine max
  Coding DNA Sequence Number=SeqID_3016
atattttctcttcaaaagtttctagtactgtcattctttttgtctctcatccttctcgtttattaaatattttaataattttattcgattccaaagtttctggccactgccctgttatagaaagcgatatttcttcatgtggtggcacgacgaaaatctctaaaaaaggagggaaactagaagaagctttgatcgaaggtgaagtagggtgacgagaaaaaatgaatgttggattttaggttcgaaaggatttaaaaaagaaattggtctaacttgatagtggatttcaaatttggggcttttattgaagtatatttttgttacagtttttttattttccgttttgttcatttttattttattttaagagttaattattaattttgttccctaatcattttaaatgtgttaatttagttctcagatt

SEQ ID NO: 12796 - DNA, 551 bp, Glycine max
  misc_feature (148)..(148): n is a, c, g, or t
  misc_feature (290)..(290): n is a, c, g, or t
  misc_feature (295)..(295): n is a, c, g, or t
  misc_feature (322)..(322): n is a, c, g, or t
  misc_feature (328)..(328): n is a, c, g, or t
  misc_feature (334)..(334): n is a, c, g, or t
  misc_feature (367)..(367): n is a, c, g, or t
  misc_feature (394)..(394): n is a, c, g, or t
  misc_feature (396)..(396): n is a, c, g, or t
  misc_feature (418)..(418): n is a, c, g, or t
  misc_feature (465)..(465): n is a, c, g, or t
  Coding DNA Sequence Number=SeqID_3017
gttactatgctagatactacactgataatgaacatgcgagctccgctccggggtagtaagcgcgaggctcgtatctcatgatctagagataggcgatactacagcgtatgagatctacggctcgagactaagatctgtagagaagtgnaagagctgccatggtaggcatgtgaaaggatgaatgtgatagcgacaatcaaggattccgtctctgcgctatagtactaacatcgcgagcgatactacaggcgctcgacggctgataagacgacgagaggacctacagacgncccgnttcttagtgtccagactctagcagcanaggaancttacnaggggagtagtctgagtctacatcccctgcgtnagcagcaacgcgcagctaaacatcggngngaggacatctggtcgacgatcncctgcgggtgtggctgcgcggcgacagtattctcaattggatagccngtcgtggctcctcgctccgccgcgtgaggaggctagcgaggacgcgcttatctgtaatgtgtgtaggctgctaggcgagtgaatca

SEQ ID NO: 12797 - DNA, 160 bp, Glycine max
  Coding DNA Sequence Number=SeqID_3018
aaagaccgagtttgaacgagtgaagaaccgcattgcatccggatctgtcaccttcaagcgtccgaaaagataggcctggcgctgaggcacgaggtgatgctgaattgctgcccatcctgtaactcaacaaataatattcatacgcgaccgcaagatgacc

SEQ ID NO: 12798 - DNA, 526 bp, Glycine max
  Coding DNA Sequence Number=SeqID_3019
gaaggaggcttatgcaggcctgcaaacagcaatgttttatagcccagtcatactctccatggttagcacagcaattgtgtgcatgtgggtaacttcacttttcaaaagctcgcctagagttttttatatattcccacccttcatctgggaatcattagagtacggggcaaggtaatcttttatatcaggggcattctactgtaatcttccaccttttttttatattttattttagaaactgggtaagtttttgtttttgggtttggattattgacaggttatgcatccatagtaatagtatctgtcaccaacatatttggggaaaccccgaggtagacatttcgcctgttcaggacagaatcttttttattaatcctgtcagcctcttaaatatggggtcaatgctcttagtccataatatatctgataatagggatcacgccataacagtttttagcaatttgaggaaatcaccttttattaattagtcgaaaaatccaagatattttcggtccattttcacaaa

SEQ ID NO: 12799 - DNA, 560 bp, Glycine max
  misc_feature (54)..(54): n is a, c, g, or t
  misc_feature (77)..(77): n is a, c, g, or t
  misc_feature (124)..(124): n is a, c, g, or t
  misc_feature (133)..(133): n is a, c, g, or t
  misc_feature (139)..(139): n is a, c, g, or t
  misc_feature (162)..(162): n is a, c, g, or t
  misc_feature (176)..(176): n is a, c, g, or t
  misc_feature (273)..(274): n is a, c, g, or t
  misc_feature (321)..(321): n is a, c, g, or t
  misc_feature (331)..(331): n is a, c, g, or t
  misc_feature (373)..(373): n is a, c, g, or t
  misc_feature (379)..(379): n is a, c, g, or t
  misc_feature (391)..(391): n is a, c, g, or t
  misc_feature (421)..(421): n is a, c, g, or t
  misc_feature (470)..(470): n is a, c, g, or t
  Coding DNA Sequence Number=SeqID_3020
gttactactatactgagatcctcgactgagctactagactgctacgagctctcntaatatcgaacggatgacacctnactatatagcgacaacgaatcgtgactgctatcatgcatgtaccgancatacgagncacgtntcgagctcgtctggtgatatgcngtgaacgtcatacncgagacctaccgtcactaacggaacacctgcactacgagtgcgtacgtatacaacgcactgatgattagagatatcatgagactgcagcgtcatgannccgacgcatatcgttccagtcacatgacgctggttgaaattattctngactgctgcngtacgcaacgtgatgcaattgtgtacgtcgtacgagagaatnatctgnaacttctgttangtatgaacatacgtacgcacgcggccgtgntgcgagatcgcttcgttgcgagtcataccgcggctgtacggatccgtancgacatacgatgatctaggacgtcctggagtcttatcgtcgcatggtcgtataacaacagatccggtgcgtgagcagtacgtgtcgtatc

SEQ ID NO: 12800 - DNA, 430 bp, Glycine max
  misc_feature (113)..(114): n is a, c, g, or t
  misc_feature (117)..(117): n is a, c, g, or t
  misc_feature (125)..(125): n is a, c, g, or t
  misc_feature (136)..(136): n is a, c, g, or t
  misc_feature (159)..(159): n is a, c, g, or t
  misc_feature (216)..(216): n is a, c, g, or t
  misc_feature (340)..(340): n is a, c, g, or t
  misc_feature (345)..(345): n is a, c, g, or t
  misc_feature (370)..(371): n is a, c, g, or t
  misc_feature (379)..(381): n is a, c, g, or t
  misc_feature (388)..(388): n is a, c, g, or t
  misc_feature (391)..(392): n is a, c, g, or t
  misc_feature (397)..(397): n is a, c, g, or t
  Coding DNA Sequence Number=SeqID_3021
ttacaagagggtgtggtcctaatttatacttatagagagaaattataagagataagagaaacacgaaacagcatgagaggaattaatgcaataaggatcaaatcaaacaacanncanaacacaanacacacagagncacagtatacgcgccatcatccncactcagtggatgtggtcgtagacatcatgacagaataggacaatctgagcgatcanaactgcgacggagtcaggacgacagtacagtgaaacagtgagttaagagaacaccgcggagaggagagcacaagcgctcgagtcacatccgctattcacaaagagtccactcgccccacatcanacaanaaaagcagagcgaaacaatcaaaannagagaacnnnggtgggncannaaaanacaataagaaaagaggaccacctgccgcgcgtc

SEQ ID NO: 12801 - DNA, 475 bp, Glycine max
  misc_feature (28)..(28): n is a, c, g, or t
  Coding DNA Sequence Number=SeqID_3022
attccttctcaggaatctccagaagctnttttgaagttctcatggggcagttgcggcaactccttggtctgaagtctgataacctttatgttggtaagtcaggtgcatccattcttctaggcaggggaaagagttttacaaaatgggagtgggattgtggtccacgaaacctatatgcttaaagcttcaagcatttgcatctacccttggaatgcgtttttaagttgtgcccgccatttccccaagatgaatgtcatggattgaagttggaacacggagttggagttggctctttaaacgcgcggaatctcgtggaaaggggtggcgtctgtgggaaatgtatgatgctgccacctgtgtgcatcaagaacgatcgaaaactttagccgagagaatccgttgtgtcgatgcgatcaagtaagggtcgcggtaaacggatttatttgcgaggtggaaccgttatagttgaggccat

SEQ ID NO: 12802 - DNA, 487 bp, Glycine max
  misc_feature (26)..(28): n is a, c, g, or t
  misc_feature (185)..(185): n is a, c, g, or t
  misc_feature (292)..(292): n is a, c, g, or t
  misc_feature (294)..(294): n is a, c, g, or t
  misc_feature (313)..(313): n is a, c, g, or t
  misc_feature (317)..(317): n is a, c, g, or t
  Coding DNA Sequence Number=SeqID_3023
ccatctctgcgctatggtcggattannncctatctcttaacacttgtgttgtctgccttctaacaccactgcgaggtagactcagtagatgtgtatgctcgcgttgcaaaatataagatccatatctcttcagagcacagggctaacgcaatgaggtatggtagcccataggccgtggaggtggntactctagtatctatattatgttgtgacatcggtagaagaataagtatgtaagtatctggggcgcatctcactctccttacgcttcgatgactagtgttagtggagnanacacaaactcactaactanacantagttagggcgtgtgcggcgtgtcggtgggtgtcatgacgacgacgcaccgcacccaacacacactactatcccgcatggtttctaattcagatttgggcgcggggggtgcgttatacctctcttatatttattatgtctggtgctggtacagcgctctgtgtctcattc

SEQ ID NO: 12803 - DNA, 439 bp, Glycine max
  Coding DNA Sequence Number=SeqID_3024
gaagggcggttctcacggtgtcaacccagacgccatccctctcgccggcggcaagaagattggcgaggacgcgtacaccgagcgcaagagcttgcaagtcgactccatcgacgccggcctgcctgccaccacaagcagcaacaccgcgcgcaacgtcggcactgctgaggccactggcaggcccagcacgacttctgagcacgagaagtcgagcgttatttctggtggctcgggatcggaccacaagaagacgagcgtcacttctggcggttcggggtcagagcataaggagaagaagggtcttgtggagaagatcaaggagaaggtgcacatccacaagcacgacaagtgagggtttctgctgttgagccctgatgtgattatgagtttacgttctagcgagcgcttggttcagctgagtcctgtatttaatgctttc

SEQ ID NO: 12804 - DNA, 543 bp, Glycine max
  misc_feature (38)..(38): n is a, c, g, or t
  misc_feature (45)..(45): n is a, c, g, or t
  misc_feature (82)..(82): n is a, c, g, or t
  misc_feature (132)..(132): n is a, c, g, or t
  misc_feature (163)..(163): n is a, c, g, or t
  misc_feature (207)..(207): n is a, c, g, or t
  misc_feature (307)..(307): n is a, c, g, or t
  misc_feature (448)..(448): n is a, c, g, or t
  misc_feature (450)..(450): n is a, c, g, or t
  Coding DNA Sequence Number=SeqID_3025
atgtggtggatgtgcgctctcgaccctctccagtcccnactcttnatgtgcgatagatcatcatcactgccgatgagcagangacgagaggtacgttcgctcgtcagtatggttctcgcgccatgctcgtancacacacgcgtagcgcttaggcacaacattnatgacgggttcgtggcctcgtctcatcgaacctctatatatgtnagtccactcgtatgtgctcagcgtgagctattatgttggtgttattatcctggtctccacagaacactgcgactcggctacatgcgattcgtggactgtngctatgttcgtcgtgttggtgttgtggtatctatagagtgcagatatcgcgtaatatggatagagtatagtagggtgatgagagaatatgcgtgacgcatgtctcgtgctctctatacgcttagttctgtgctagtcgtantngtgatgtctgatgtgcatagtatcgtgtacgtacgtgcagtcgtgtcagactggcgcgtggccgggctcaacgtgatgtgtggatgcggatat

SEQ ID NO: 12805 - DNA, 571 bp, Glycine max
  Coding DNA Sequence Number=SeqID_3026
gatgggcatgattctgaggaccctactaagcagagcactgctgatatgactgcttttgtccaaaatcttctgcagcagatgcaatccaggttccagacaatgtccgactccatcatcacaaagatcgatgacatgggaggcagaatcaatgagctggagcaaagcatcaatgatctaagagccgagatgggagttgaaggcactcctcctgctgcctccaaatctggcgatgaacccaaaacaccccctagttccacttgaacactaagtgtcacatgatcttcctgcttatgtatgcatctgcagaaacattctcaagtttgttcaggagcagtgttattacttttagatttcagtttcaaaaggcatgaatatgttgttgagttcatcagattgattgatggaggatgtgggtacattacattattatgcacttatgttgacttgctttctatgttggttttgagataactgagaaagaccagtgcttgatggatctatactccgcttggttatacattttattctctatagtccgaatgtatagcaattacaactttgtgtgtaccct

SEQ ID NO: 12806 - DNA, 507 bp, Glycine max
  misc_feature (26)..(26): n is a, c, g, or t
  misc_feature (31)..(31): n is a, c, g, or t
  misc_feature (37)..(37): n is a, c, g, or t
  misc_feature (44)..(44): n is a, c, g, or t
  misc_feature (62)..(62): n is a, c, g, or t
  misc_feature (94)..(94): n is a, c, g, or t
  misc_feature (103)..(103): n is a, c, g, or t
  misc_feature (106)..(106): n is a, c, g, or t
  misc_feature (149)..(149): n is a, c, g, or t
  misc_feature (167)..(168): n is a, c, g, or t
  misc_feature (206)..(206): n is a, c, g, or t
  misc_feature (209)..(209): n is a, c, g, or t
  misc_feature (242)..(242): n is a, c, g, or t
  misc_feature (289)..(289): n is a, c, g, or t
  misc_feature (314)..(314): n is a, c, g, or t
  misc_feature (345)..(345): n is a, c, g, or t
  misc_feature (360)..(360): n is a, c, g, or t
  misc_feature (378)..(378): n is a, c, g, or t
  misc_feature (405)..(405): n is a, c, g, or t
  misc_feature (407)..(407): n is a, c, g, or t
  misc_feature (411)..(411): n is a, c, g, or t
  misc_feature (414)..(414): n is a, c, g, or t
  misc_feature (417)..(417): n is a, c, g, or t
  misc_feature (434)..(434): n is a, c, g, or t
  misc_feature (443)..(444): n is a, c, g, or t
  misc_feature (446)..(446): n is a, c, g, or t
  misc_feature (468)..(468): n is a, c, g, or t
  Coding DNA Sequence Number=SeqID_3027
tagtagtgctgctatagtgacgtctngacancgcatncgaaccnagtcacacatatcgatcncgccatgagagacgtaagcaccgtgcagaacntgggcgtantanttggggagtcagtcacaactatagacacagcttcatagctagngcatgagtcgacgatatnntgtatcgatgatcgagatcactaggagcagtcgtatgnatnatcacatcagattacggtctactgcagtcgtgnagcagcatacaagcagtgaacgctactacgccgatacgcgcgatagncacgacatcgagcagacagacggcnaaagtgagtgtagcacgctgtagacgtactnagtaaagtaggtagntatgagtcgcacatcagnacgtacgcatgctggatgagtacgacngnacanganagncagaagcagtagagacntctatctanntnaatattaagtatactatctacnacattcaatagctgtcagtgtagcagtcagctgcagcta

SEQ ID NO: 12807 - DNA, 512 bp, Glycine max
  misc_feature (331)..(331): n is a, c, g, or t
  misc_feature (413)..(413): n is a, c, g, or t
  Coding DNA Sequence Number=SeqID_3028
tacctggcggcgatggacttactgagcgatgtcgcactgtcctcctctcggctgcgcgcatcgccttcatctgtcctacaacacccgcgcgctactacctcgccgtaataatgacgacactcgtcgatctagtatatatacagtcgctatagcttcctcacctgcagcacatcctcgatatgctgtaccacaatcaatagtagatacacgcgttgtggtcatcacgtgctgcaacttctaaaataataatatgtctccgctcccgcgctgcgcgggtagtaggcagaagagagcgaaccacgtcgacattattacgggggggggcagaagnttgtctgtgattgtctagtcattaatgcgcgttccgtgtgtgtattaagttcgcttctctcgcgtggcggaaaaaatccctntttgtcgcgcgcggcgtcctatcttttggtatccaatcttcgtgtgttgcgcgccgctgtcctctcctcgcgactattctatcgcactgcctttgatga

SEQ ID NO: 12808 - DNA, 408 bp, Glycine max
  Coding DNA Sequence Number=SeqID_3029
tcattttttcttgactttcctcagccccctaactctcctccctttcctatttttctttctatttccttkggcaactacctctaccaactcgcccctccccttaagcctctccttcctccctcttctccattgcactccctacccttactttccttctatcgtgcctcccctctcctccctccacccctcattccccttccaccgaaacccacttagggacacgatctatctctccctctctctcaaacccgtcgcgttcaaaggcaccaccgccgccaatgcctctgcggtggcctccgacagcatgttcctggcggcaacattggaacccagatctgccttcaaaatgtttcaagaacacaaccgaaaatatgaacatggatcaaatcttagatctgtaatttttct

SEQ ID NO: 12809 - DNA, 502 bp, Glycine max
  misc_feature (162)..(162): n is a, c, g, or t
  misc_feature (365)..(365): n is a, c, g, or t
  misc_feature (424)..(424): n is a, c, g, or t
  misc_feature (457)..(457): n is a, c, g, or t
  Coding DNA Sequence Number=SeqID_3030
agatcggccgcgacaaatagattgtggttcggcgccgcacgcctctgggcgcgcgcgcggtcgggtctaattcagttgttattatgagggaatgagtggcgcgagcgagggcagtaaagtgcacgcagtgtaatttaacgacgggcgggggggggagaggangagtagagtagtaggtcgacggtccttatctcctttgtagagaagagggatgtagtatgtgtctgtaggaaggagggcgtagtgcggggtgtcgtagtgttgtgtctcttgtatagagatgggcggcccttggtttatttcttgttggatatttgtatcggagtaattaatccaaaggtgggcgagatcagggagtgtggganatattaattactggaccatgggcgttctcagaggagcgacaggatgattattttgaatnttgaatataaaatatagttgttcaacttatggntgtctgtgttacgacagcacacagacagcgacacaatggcgagag

SEQ ID NO: 12810 - DNA, 597 bp, Glycine max
  misc_feature (74)..(74): n is a, c, g, or t
  misc_feature (124)..(124): n is a, c, g, or t
  misc_feature (201)..(201): n is a, c, g, or t
  misc_feature (239)..(239): n is a, c, g, or t
  misc_feature (351)..(351): n is a, c, g, or t
  misc_feature (353)..(353): n is a, c, g, or t
  misc_feature (382)..(382): n is a, c, g, or t
  misc_feature (446)..(446): n is a, c, g, or t
  misc_feature (529)..(529): n is a, c, g, or t
  misc_feature (536)..(536): n is a, c, g, or t
  misc_feature (543)..(543): n is a, c, g, or t
  misc_feature (558)..(558): n is a, c, g, or t
  Coding DNA Sequence Number=SeqID_3031
gagtctatctaatagtggtgtggacgatgaggtgggatgtgagtatgatgacgtatagagagataatgagtccnatcagaaggtggaagatcattacataataatacagtagacaacgaatatnagcaatcagtaacagaccactacacactctcacccacgtataagatcacaagcacagagctacacaatatcacacgntaaaatagattgctacgccccaaatacatagtactatnacgcatcaatactctagctctcttatgactctcgattatagttgcgagcgtatagataacataaacacataaatagatgacatactcacataccatatataatcacggtgantncgaatactgtacagactacatagtgatangagatatccagatctcataaatatgttatagtgtacacatggtcgtacacagtatagctgacangtagcaaacacatagacaccacatactaataactagatcacgctcatacgtaaagcgtcgacaagagcgctataatagatatncatctanacactcngacagatctcatcgnctgcgtcaacgaataaacacaaacatctcacatcagcac

SEQ ID NO: 12811 - DNA, 439 bp, Glycine max
  misc_feature (26)..(26): n is a, c, g, or t
  misc_feature (111)..(111): n is a, c, g, or t
  misc_feature (123)..(123): n is a, c, g, or t
  misc_feature (133)..(133): n is a, c, g, or t
  misc_feature (138)..(138): n is a, c, g, or t
  misc_feature (166)..(167): n is a, c, g, or t
  misc_feature (175)..(175): n is a, c, g, or t
  misc_feature (206)..(206): n is a, c, g, or t
  misc_feature (223)..(223): n is a, c, g, or t
  misc_feature (280)..(280): n is a, c, g, or t
  misc_feature (356)..(357): n is a, c, g, or t
  misc_feature (374)..(374): n is a, c, g, or t
  misc_feature (377)..(377): n is a, c, g, or t
  misc_feature (395)..(395): n is a, c, g, or t
  misc_feature (407)..(407): n is a, c, g, or t
  Coding DNA Sequence Number=SeqID_3032
cacttagaataaagctatccgcctanatgactgcattgaggtctatagatcctagagatcttatcgctcgatcccgccgaatacgtatctgcgccacgcatagcatatgtnatcctagtctanagcgccgtantgccnacgtatgactgcctgatagtctccgctnntcagatcnctgcgcgtcgatccatgggtgtgcgtagtcnctacgggtcttctagcnacgttcagccgaacgcctatgtgcgcctcgctcgtcctgtgtcgccgtcgactactnctcactgctccgcagagcctcgtcctagcagtccactcgtcgtctactcacatgtcgacacaatgcgaagaacggnntcgaccacgacccactnatngtagcgcacatcgcatantgccatccctgnatctacttcatactgctgacagcatcgtccgg

SEQ ID NO: 12812 - DNA, 233 bp, Glycine max
  Coding DNA Sequence Number=SeqID_3033
ttcaagttgcagctggtggaatgctgtcagtcccttatgacatgggaggtctgccaatgcgcaatgctgtaggacagccaatgcccattcaagctttaactacagccctcacaaatgctccaccagaacatcagaagactatactcgatgaacctgtatacccacttataaatcagctaaaacataattcttcttacaaagttacatacatacttgctaagatagaccagcgc

SEQ ID NO: 12813 - DNA, 558 bp, Glycine max
  misc_feature (211)..(212): n is a, c, g, or t
  misc_feature (278)..(278): n is a, c, g, or t
  misc_feature (294)..(295): n is a, c, g, or t
  misc_feature (325)..(325): n is a, c, g, or t
  misc_feature (355)..(355): n is a, c, g, or t
  misc_feature (363)..(363): n is a, c, g, or t
  misc_feature (365)..(365): n is a, c, g, or t
  misc_feature (432)..(432): n is a, c, g, or t
  misc_feature (493)..(493): n is a, c, g, or t
  misc_feature (518)..(518): n is a, c, g, or t
  Coding DNA Sequence Number=SeqID_3034
gtggtgcgttcggatatactctatacaactccatacatattgtattcgtcgtgttcatttatatcttgttatatagtagtatccagttatttattcgttagatatgtgtatatattataatgtcattatattatattacattatatttgtctagagtatcattcagtgccgttctttaggacgttctattgtattgtgctaatgcaagganngcgagccaagacacagacagcgacgcacgagcaatggtgaaaaacggaacaagtaatcgaacgagngagaagagaaagaggnnggtcgagatttgtatagtacacattgaatntatttatggtgtaataagacaatatgattntaaggacntnatctatgatatccgagcacgcaactcaaccattcattagcatattgagataataagttcgtgactcncgagcgcagagatactatgacagtgatacgcggcatagtttgtgaattgttcgtatggtgnttatgagcgcacgcgcgagaggagnatcacgaggagagccgtcacgcatcgcagtaagtctggtg

SEQ ID NO: 12814 - DNA, 287 bp, Glycine max
  Coding DNA Sequence Number=SeqID_3035
gtcgttttcgctgctgctttgcttatgtagagactagagagggtttcgtggagtttttttttattattattatcatcgttccgaatttacgcggatgcaccaggaagtttcatttgtaactaatttttttttgaatctgaaatgttctaatccccgttgaagtaacattgaagttgacgctcttttgattgcaatttagttatcgtaaaacttcagccttcatgttcagaaaccatgttttagctagttcggggtgttctgaaatttctgaatgtatgtaggcacca

SEQ ID NO: 12815 - DNA, 546 bp, Glycine max
  misc_feature (199)..(199): n is a, c, g, or t
  misc_feature (487)..(487): n is a, c, g, or t
  misc_feature (490)..(490): n is a, c, g, or t
  misc_feature (492)..(492): n is a, c, g, or t
  misc_feature (495)..(495): n is a, c, g, or t
  Coding DNA Sequence Number=SeqID_3036
agcgatagagcggtgtgcacgtaatattgcacgaacaggacgtgtgagagagacggcgcgggagatagtagcgtgtggttggtgagaggagacaggagcaaggcgcgcgacaagaacaaggagggcgcggcgtatagccgtggagggaggagcgagaataagaatcgagaggctcgcgcgtcgggttcggcgcgtcctnaaggtgaggcgcgagtggaaagcgagacacagtggcggcgagcgcgcgcgctcgggtcgcatacacgtccgacagggaggcgccaacacacaacggagcggcgcgcgccgccgccgcccacgacccgccgacgcgcgcggagtggtgtagcgtagagtaatggcggcgagtggcgaggcgtcaggagctgaaatacacgacgacgggaaagagcgagtggtgtacgcgaaagagtgagggagagtgaatagtagggttgaaacaaacaaccccaacatatcaccactnctnancanaaaaagcgcacaggacggcaacacgaagacgagacacccaggcgccacgtg

SEQ ID NO: 12816 - DNA, 537 bp, Glycine max
  misc_feature (486)..(486): n is a, c, g, or t
  Coding DNA Sequence Number=SeqID_3037
ctcacttatatactcgactcatctgtcgtgtcgcctaccgctatatcggtcccattctcgcacgctatgtagttacgttgatgcgttgtgctctaccctgcctagtatataatagctagcggtcgggcgtggcgagagaatgttcgtatacataatacactacatgcgccatactccgtgcgactggcgggtgtggcgctgtgagatcgccttataaataaactcatcaacaataagacgccgcggcgagatgtacggggcgcgaggcgggtcgaattaatatgtcacattaatatgacgtcattcatatcttattagaccaacagcgtctcgcctctgattaatatgagaccctctccacgagggtcgctcctgcccgccacacacaacctctatgttgctgtcaccgtcatgtgccccactaccaagaaacttatagttagttgcagtagactagatagtgccgcgtcgttaatacatatccgntggacccagaacactactccgacgccgacgctgtctgtggtctaacaacga

SEQ ID NO: 12817 - DNA, 405 bp, Glycine max
  Coding DNA Sequence Number=SeqID_3038
caaactggatccaaaccctaagccggcgatggaagagatggtgagcagcgggctggcggggatggatatctccggcggcgatagcgacggggctccggccaaaaaaagaggggagaagaccaaggaagcgaggagggagaagctttccaggggtcctccaccgtcgccgtccggcgaggggttggaggaggagccaccggatacggaggccagggaggaagatgagatcccatgctaccgcgtgctgtgggacagccgctacgccggcgaattcggctccttcgacgaccacacacgtcttggtcccatgcgctttacatccggacccatcccgcgacacgccagacctgagtgtaccatgaacatctactacatccgagtgtacggcctagaagacggcctcca

SEQ ID NO: 12818 - DNA, 575 bp, Glycine max
  Coding DNA Sequence Number=SeqID_3039
ggtgtgcacttgtatccgttaatccactttttatatgcattggaattcttgcagcactactggctggtttgcctctggtgggaaatcctatatggtggcggacaatgtttggaatcactgtagctccatctgttctgttagcacttggaatgactatctctccagacagacctcggtggttctttcatcaaggaaaaatatctgaagctgaagaggctgttaaaaccctatatggaaaagaaagagtgccctttggttatgcatgacttgacagcatcaagtgaaggcccttctgaaactgaaaccagaaggtttgatctgtttaatagtcgacataagaaagtggccgctgtaggggcaacccttttcttgctcccgccattggcaggaataaatggagcggccatattattcaactttctgttttccgcagtgcttggaattgcttttgacgctgcaaacaagtggacttgctttgtggctcctaatggttttagggaccagatggtcgcttcgtgcccttgaaggccacataaaggcgaggaatcagtttctcctttatacaacgcctttag

SEQ ID NO: 12819 - DNA, 551 bp, Glycine max
  Coding DNA Sequence Number=SeqID_3040
agtaggtcctaggtcgtggcgtccaactctagaagtagtggatcacccggccgtgcagaattcgcacgagcctattccgtagaacatcgtatttggaaacaaagttgcactttgctgtcagtctcggtgagatagaattccatggtaaccgtagtgcttgagctattcgtttcggagctctatattatcaattggagctcagggatcagaaagcaggagatggtagcaccagcgtgaggataaataatttcagcgaagtgcatgtggaggctgtaaaaaagtgtggggaagagaataagggcgactatgtcaaatgtcgtacagagagtgaggctgtcacataatcatggtctctcaggagaaacaaaaggcctctcaagaagacgctttgatgttagattaaggatgatggtgtgatgtggaatggtcacttatggctagggcatctgggcatgagggggtcacaaagtataatgatattgatcagttgtatcaataaatgatgatcatagtgaatgaatagtatatttgcgagttgtggctttgtccga

SEQ ID NO: 12820 - DNA, 369 bp, Glycine max
  Coding DNA Sequence Number=SeqID_3041
ggatgcgcggttcgctaaagaacccgaacaaaacaaatcaacccgccttttgtttttaaatgacacggacttgttattattgccacatgtaatttttgggggcacatttggattattattgtgggaaatttcggtggaagaacgttgtgatgatatgtacttcttttatttggaatttttttttggtttattcattatttatcttaaaatattttgtgctgtgtagagtatttgaagggaaaaaagaaaagtgaaataatgctcgagtttgatgtaaataattgaaggtgtttcgagtatgcttcgctctcataatgatcacatgaacgttgtacatgaggaagaacatgaattgcttgtacgtaaggc

SEQ ID NO: 12821 - DNA, 560 bp, Glycine max
  misc_feature (434)..(434): n is a, c, g, or t
  Coding DNA Sequence Number=SeqID_3042
gtgtactatctcaacaactccactgcacccaccatcatcacgcgcccgttccttatatgcgtatatatgataattgatccaggatagaacggtgacttatgacggcattccgcacgctgcccacacaccatcaacgatctgtataatggtacttgatattagagcaccaaagtatatatgagatgatagagtacacacgactctcacacaaaagtcactcctcgcgtctctcacttcatcgacccataatgtatcttatgaatgctctccctcgcctcccaccacatgacgatcagagattaacaagttattgtatcccttcagcgatactcccactcctgacctcccctcatgatcacgtatactcgacgtgttgcatattcaaaactctctctatatactgactatcgacctatactatcactccataacgngcgagatcatgctctcctcacactcagctccaccgtatctccgaatcgcaatcactccactcgcacacaccgatctccgctgagtccgctcagatgaccctagcattcgcataactcactctatat

SEQ ID NO: 12822 - DNA, 556 bp, Glycine max
  misc_feature (354)..(354): n is a, c, g, or t
  misc_feature (531)..(531): n is a, c, g, or t
  Coding DNA Sequence Number=SeqID_3043
gtacaaggccgagaagaccactgcggcgaagaagaccaaggccgagaagcggacgccggcgtacaaggagggcggagagaagaatggccagaaaatccgcagaagattgggcagacgcccaagatccacatcttcaaggcgctgaaagccaagcggaggcccggagatcggcttctccatcaaggcccatgtccaatgatgaaacccctttgatcatcgaacttccttccaagaaatcttggccgggccaagtcccgggcaaggctccgctccggctatctaccccaaaaagcccccacccattcccggtccgccggggaaggaacccaggactcttcggggccggccctacgnaccctcccccgcggagaaaggtccgcccagggtcacggcctgtcctcccgcagtgggcaaccaaatgggccaacacaacaaaggggtagcctccccgcccgatagaaagagggcggcgatccgcgggaatcacctatgggggcaacacggatagcggaattcagggagagaaaaggncagcgggtctttagaaaacaacttg

SEQ ID NO: 12823 - DNA, 458 bp, Glycine max
  misc_feature (147)..(147): n is a, c, g, or t
  misc_feature (229)..(229): n is a, c, g, or t
  misc_feature (394)..(394): n is a, c, g, or t
  Coding DNA Sequence Number=SeqID_3044
gggagacaaacgaggacaagcaatagtatacattatagatcagatcgcaaaacagtaacataccatacaatggaaagaatacataagatagacaataaacaatagacaacaatactacagcgcacacaccagaccctaacctatcantactagattctttccagtcttaagctacgggaaagaatggaagagctcgccgctacgcaagccgccgcatcgatccgcgganacggaagaaaataattctgctcgacacacacccctataacaagcactacaccttatctgctttaacccactaaaggtagtcaagagataaatagatcgaaggtagaccgcatccacgccaaagcgcccacgcgaggggagagatacacacgtattataggtaagnaaaagaagaaccatgacccgtctccatcataagtggagggaccgccacagagctccaaagaaaa

SEQ ID NO: 12824 - DNA, 485 bp, Glycine max
  Coding DNA Sequence Number=SeqID_3045
gttaacaaagattccagcaccaaatcagaatatagcccaaagcaatgtggcattctatgagccaataacgatcgttccttcatttccacaaaagaatatcaatcaatatgcacaagtggaaccacaagtttatacagagaataatatgaatgggaactatggaggaggaatggtacctcagaacaagaataatatgagcggaatgactcaattcaaccctctcatgaacttgaatgcgatgaatcatatgccaacagcaaatgaaataaatcattataacaatgtgcctggctacaataatatgaataatctcagcaataacataccaaaattaaccagcatgcacagcaataatacctatactagcaatagtactctagataccacaattacaaacctcacaaatatgagcaatatgagcagtatgaatgatataagcaatctcagtaacctcagcaatgtcagtaatgtcagcagcatgagca

SEQ ID NO: 12825 - DNA, 599 bp, Glycine max
  misc_feature (70)..(70): n is a, c, g, or t
  misc_feature (81)..(81): n is a, c, g, or t
  misc_feature (104)..(104): n is a, c, g, or t
  misc_feature (127)..(127): n is a, c, g, or t
  misc_feature (145)..(145): n is a, c, g, or t
  misc_feature (178)..(178): n is a, c, g, or t
  misc_feature (215)..(215): n is a, c, g, or t
  misc_feature (234)..(234): n is a, c, g, or t
  misc_feature (239)..(239): n is a, c, g, or t
  misc_feature (264)..(264): n is a, c, g, or t
  misc_feature (280)..(280): n is a, c, g, or t
  misc_feature (298)..(298): n is a, c, g, or t
  misc_feature (319)..(319): n is a, c, g, or t
  misc_feature (338)..(338): n is a, c, g, or t
  misc_feature (350)..(350): n is a, c, g, or t
  misc_feature (383)..(383): n is a, c, g, or t
  misc_feature (411)..(411): n is a, c, g, or t
  misc_feature (431)..(431): n is a, c, g, or t
  misc_feature (450)..(450): n is a, c, g, or t
  misc_feature (510)..(510): n is a, c, g, or t
  misc_feature (521)..(521): n is a, c, g, or t
  misc_feature (525)..(525): n is a, c, g, or t
  misc_feature (545)..(545): n is a, c, g, or t
  misc_feature (562)..(562): n is a, c, g, or t
  Coding DNA Sequence Number=SeqID_3046
tccactagtcggtgaagtgcgctcgcgtgcgcacacgcaccgcgacagccgagtgaaggaggcaggccgntgcgcgcgagnaagcgagcgcatcacctccaagngagacgcgggcggcagcatcgcnccctccgggagtcatggngagatcgcacatatcagtggggtagatgcgcgncatcgagccaatcgccgctcgcgcgtggggcgcggcncacaatagtttcgtgtggnagacncgtacttatacgcgtgctcgtatgnagagcgagacatgctncgacgtgtgcgcgagagnatcgtgagagacgatatgcgncacgtactagcgccgacgncaagcactacgntgcgtctgtgggtgagagagtcggagacatgtntcgggcgtgtggcgcagatcgggacacnagacagacgctagtgagtangttgtagcaggcttgcggnctgcctagcgatgagcgtgcgtgtcggcacgtcgcagtcgtcgacgtgcagactccccancctccctgatncgangtggtctagcgtgtgcgagncgccgtacgaaccccantattcgcggacgaggcgacgatatgattatgtcttcg

SEQ ID NO: 12826 - DNA, 294 bp, Glycine max
  Coding DNA Sequence Number=SeqID_3047
catgcgtccgactgttgcgagaagaccacagaggggcggagttcatagttccagtgccatatgtcaaacaagtctagctgccgaaagctggtgggaggctagctattgcctctgatggcatactggatgctctatcatcagaaatggctgccaaattttgccgtggtttgcctgctgaacttgctgctatgcaggttgccaaggaagcactactaacgagagggttaatggacgattccactagcatagtagttgacataatcccacctgataatgcattgagccccacaccta

SEQ ID NO: 12827 - DNA, 314 bp, Glycine max
  Coding DNA Sequence Number=SeqID_3048
agaggtcatttcaagattgctgggtgcttacaaactcaaaggttgaccgcgaaaaaggattacatttgtatttctttgtgggaattttaaaccaccagtactactggccagtattgattgccccccgaatcttggtttttttaggaaatgattactggtgactcccccgcggaatgggggggccttataattgaacccccaacggtgggtgttgaagctgggatttcttaagagggacaaaaatcctgggaaaggtcttcttggtttttcccttgttgggaaaaaaaaaaatctcctgttgttaaaacatgatg

SEQ ID NO: 12828 - DNA, 551 bp, Glycine max
  misc_feature (210)..(210): n is a, c, g, or t
  misc_feature (388)..(388): n is a, c, g, or t
  misc_feature (476)..(476): n is a, c, g, or t
  misc_feature (526)..(526): n is a, c, g, or t
  Coding DNA Sequence Number=SeqID_3049
gacagtcactacacacgcgataatagtcacgcgtatatacattcataatcagatatcacttcgtatggttggcatacttattattatcgatgagaagtcactaatattactcagtagtgagtaatatcctgtgctattagtacttatgatttgtaacgtgtttgtattttactcgctacgcgctcccattcactacccttctcgccttcngccgactgcatcaatgcaacacagacaagatacacaacagacgtatagcctgcacagcgagactgcggggaggatgagtacggcagattggtcgagtagtgataatattaatttctgtaacgcacgatgcgcccacagtccgcttgctcatgtgtcggtgacaatcgtagcctaaatnagttgtcatgcctaccacgcgccccactgtctccaccacgcttagttgtagatcttcgtgttatatatttatattacatgtgtgaccnaccacggcacggcgcgagagcggtatcctcctacacctctacaaataaangtaatgacgacccactgtctgcatc

SEQ ID NO: 12829 - DNA, 472 bp, Glycine max
  Coding DNA Sequence Number=SeqID_3050
accgtgacgaactctgcttcttcctccacaaaaaccagagcccgccgccccgagactcccaaaacacttcttttcccaaccaaatccaccaaatctcgtgcgagaaattttgcaatggcgtcggtagcgtccgaagtcgatcccgccgtggagccccacatcgtcgttgaggagtcgtccagcgctggaggcagccgagaggaggcgcccccagaggctgcggcggtagaagcggtggtcgagacagagctggcggatgcggaggaagaaggggagtgcgggttctgcctgtacatgaaggccggaggttgcaaaggaggcgttcgtgtcgtgggaggagtgcgtgcaggcggcggagaaggagggctccgacatggtcgagcgctgcttccaagtcaccaccgacctcaagaagtgcatggacgcccacgccgactactacgcccccgtgctccaggctgagcagaccgtc

SEQ ID NO: 12830 - DNA, 337 bp, Glycine max
  Coding DNA Sequence Number=SeqID_3051
cgcaaaacggagaccgcggccgagtccgcggccgcgaggagggccaagtggaagaagaggcggatgagagaagaagagaatgagggggctcaagagaaagcgccgacagatgaggcagcgatccaagtaggtaccttcgggcgggggaaaggaagcatcttacagcctggccgcgggacttcgagggaggatggcagggtctggttgttactggtgtgtttgctgttttgggtgtggtataggtgttttatcctttttttgctattttgctgctctttgttttatgtgttgtgtgtaatgtatgtgttttatgtagtttgtgattgtatgtgtttga

SEQ ID NO: 12831 - DNA, 197 bp, Glycine max
  misc_feature (66)..(66): n is a, c, g, or t
  misc_feature (68)..(69): n is a, c, g, or t
  Coding DNA Sequence Number=SeqID_3052
ggtcataatgtttagtttgtcccggtgggcaatcaacgctaccatgaatccattttgattgctgtngnnagcgagattgaaagaaatgaaagcaggtcctttggcttcgggaaaacccattgccgttgaatggctttcccaaatccccaatttaattcaaggggaaaatttttgaccgcgtgtaaaggcccaaaggg

SEQ ID NO: 12832 - DNA, 569 bp, Glycine max
  Coding DNA Sequence Number=SeqID_3053
tatcagcccccttctatttaaatttattggatatttggtatatctattatttttaaaataaatatttttttgyyytcaaagttcccttagaaaattatcaataaaattttctggagctggattctagttaaaaaaaattggcatcttgtgtcactcagtgtgattttgtgcagaacagatgttactgaagtagctagcagcaactagcaagggtcaaacacccgtataaatggagaaccataaagatttaattattattagacaggtttattcatttagctacttattaataattacttaagactcaaattgaaattattaattaaattaaaataatcttagatcaattgatctgcaagttgtttgcaatttattagacagatttaatttgtaatacagcatgtccccgattagcaactcatggccagcrggattacactttattaccacatcatttgaaagaagatggaatctttgacttgtgttacagtataatatacacgatcttttagatctttgtacctgctatgactatgattttttaattttattcatgattgatgccacaa

SEQ ID NO: 12833 - DNA, 406 bp, Glycine max
  Coding DNA Sequence Number=SeqID_3054
aaacagttcctgctttccgttggatccccactagttttaaaggccgcccgcccaccggggggtcctacttttggtcccttgttagagtcgagatttcgagatcgcggaaatcacgcgcgtcaatgtttcatgtgtgataatgtcactccttcacactaccccagagcatataatccgaaagcctaaggcgacaagctgttgcgcgaatgatttcattaatcgcatattggtctgtgctcttgccgactttcaatggcatgttttatagtcatgcaatcataaactaccaacgaggagatagggtttgctactgtccctcctccatctctatcctcgactagcgtacggcgtgtgggattcttctctctacttatctcttttcctctcaccttacctcaattataat

SEQ ID NO: 12834 - DNA, 517 bp, Glycine max
  misc_feature (162)..(162): n is a, c, g, or t
  misc_feature (228)..(228): n is a, c, g, or t
  misc_feature (273)..(273): n is a, c, g, or t
  misc_feature (312)..(312): n is a, c, g, or t
  misc_feature (324)..(324): n is a, c, g, or t
  misc_feature (370)..(370): n is a, c, g, or t
  misc_feature (373)..(373): n is a, c, g, or t
  misc_feature (448)..(448): n is a, c, g, or t
  misc_feature (451)..(452): n is a, c, g, or t
  misc_feature (455)..(456): n is a, c, g, or t
  misc_feature (483)..(484): n is a, c, g, or t
  Coding DNA Sequence Number=SeqID_3055
tatgtagagaaaacctccccgacagcttccagtgctgatattacatctgtatgcgcgcgccgagagcgtcgagtctcgactttgaattggtgtgaggatcaatgtgtgtttctctctttgcaccaccccaccacgcacctcgctgctattgtgttgaagaantcatcgactatgcttttcggcgggcggtgtgtataacatgtagacgggacacctgggagaaatcantgtagaataataaactgcgtaatagctatacgaggtaatatctanacatagcctcctcatactcttttctctattgtatatatnatagtagttggnggtggtctgcttcgaaactcattttgtatgttgttttgtgtgttgntgngtataggcggaacgcagacgcacccctatgccatcatattcgtattattgtctgtctcgctggtggggggggggnggnnacnnaacaaataaccataggttgcgtattgnnggggggggttgtgtgctctctctatttacgaga

SEQ ID NO: 12835 - DNA, 566 bp, Glycine max
  misc_feature (29)..(29): n is a, c, g, or t
  misc_feature (110)..(110): n is a, c, g, or t
  misc_feature (119)..(119): n is a, c, g, or t
  misc_feature (369)..(369): n is a, c, g, or t
  misc_feature (434)..(434): n is a, c, g, or t
  Coding DNA Sequence Number=SeqID_3056
gcgttagatcgatggctgcagccagcganagaagtgactccctgggagtgcaatattgtggagagattacacagaagaccgatatgaagcaggtcgtgccatgtggtagngaatgtgtngtcctatattcgcagtgatgcgagagttgtcgcgtagtcgagtacaagagccgagtaatgatgcagatcgatggtcaaggctaagcagcatgtaaacgaggaaggggattatggagtattgcataagtaagagacattcgatagaagtaagtattacaaacttgtgagttcacatcagagaataatgatgaatacacgtctcgacactacagagttagcacataatagtgataatggtaatacaatatanatgagatcctaacgtcgagcatctagtgcaacgacatcatgtaagactagcagaaatatgttgtncaggtattagaagcagtgcagaggggtacacttactatacacattaaggtggtgaagttgagcagataaagtgatggtgtactacgaagtgagtgtgcactacgggtggcggtgtatttagtttgtgtcatc

SEQ ID NO: 12836 - DNA, 442 bp, Glycine max
  Coding DNA Sequence Number=SeqID_3057
aaggctgcagcgtgagagaaaactcgtcgattttcacaaccggagagctcagtctgatctctgaggaatagcagcagccatggcggagaaagcagtcacaatcaggaccaggaagttcatgaccaacaggcttctctccaggaagcagtttgttattgatgttcttcacccaggaagagctaatgtctcaaaggctgagctcaaggagaagttggcgaggatgtacgaggttaaggacccaaatgctatcttcgttttcaaattcagaacccactttggaggtggcaaatcttctgggtttggtttgatctacgacaatgtcgagagtgccaagaagttcgagcccaagtacaggctcatcaggaatggacttgacaccaagattgagaaatcaaggaaacagattaaggagaggaagaacagggccaagaaaatccgtggt

SEQ ID NO: 12837 - DNA, 539 bp, Glycine max
  misc_feature (96)..(96): n is a, c, g, or t
  misc_feature (118)..(118): n is a, c, g, or t
  misc_feature (149)..(149): n is a, c, g, or t
  misc_feature (200)..(200): n is a, c, g, or t
  misc_feature (232)..(232): n is a, c, g, or t
  misc_feature (298)..(298): n is a, c, g, or t
  misc_feature (337)..(337): n is a, c, g, or t
  misc_feature (388)..(388): n is a, c, g, or t
  Coding DNA Sequence Number=SeqID_3058
attactctagcaatatccacgtgtgacgacacacaggcagacccgcgacggctggtacagtaatcctgcctctcgtcacgccgttagcgccatctntgagactgtaagatagacagangtgtatgttggtatatcgagtagcgtatgcncagaacgaccacgctgttgcgtctgagttacttcgtttctatatcggcacnagactccgtggactgacaccatgcttgtgtgnttacaacagcgttcacccattatgtattacgagtgacacgatagacgaacgagtagcatgtatgantaccagcgacggagacatgactagtgtgatagatctatnatcgttcgtgatgactcacacagcagcgatctcgacgactgctctacgacnatacagcttacgacgtctacgcaaacactgtatacgcgctgatcgcgagtcacgcgagcagatgaggcagcgacgcgacacatgtgcacgcagatactggcagatagactgtcttgtatatagacgagtctatggtatatcggcgctcgcc

SEQ ID NO: 12838 - DNA, 576 bp, Glycine max
  misc_feature (177)..(177): n is a, c, g, or t
  misc_feature (387)..(387): n is a, c, g, or t
  Coding DNA Sequence Number=SeqID_3059
tagtcaattattctcacctcgacgcaaccagattatgttctgcaagccactcacttctcatcatcgttctatgctgccattatcacacccatctctactatacacttacatctggctaacctcccgactcactaatcacgacacgactatctttccatgagacgatactacgagacnttgcgcactgcgacctatctttctagtatgataccacaccacagcgaccctctctcctatctcctctataatatatacctaataatgggacatcgccatattagtaatctaatctgcatttctacctactctccacgacacttaagttgatcatataatacgactaatcatacaacgccatatccactcctactactcactccactcatngccacaccatatatctatatctgcataagccaattgcgtgtgctctcgttatatatacactctgtctatacggctctcctcctcactcctctcctctccgtctacccgcttcgcctcgtcgtccactctaggtgcctctatcgcgagcgctgtaaagttgtgttgtatgtatacgatcgcgcacgctta

SEQ ID NO: 12839 - DNA, 509 bp, Glycine max
  Coding DNA Sequence Number=SeqID_3060
gcaatgtatcatatctcttcctctcctcttctattccttatctctaaagtaatcaatcgcgcgaaccatataatgtattgtaattaatattaataatttctccccatcaaggttttcatcttcttacagatgatagaaaatacgactatcatctacaaaattattctcatattcccctaccatacatatctcaacaccgcctgattcttaacttctacttttaacttctgtattatacggttattctcaattatataacataacgtcttctccagctcaccccatcacttcattttccttaataatattatatagatgtgttatgactaaccactgaaatgtgacgtcaatcacgtcggaacataaatatctttctcttaaatatccattacatcatataaaaacattaatcattatttccccccctttctcatcccgactaattcatactatcttaaacaaacatcgaataaataataattcttctttctaatgacacttcaaccctc

SEQ ID NO: 12840 - DNA, 542 bp, Glycine max
  misc_feature (29)..(29): n is a, c, g, or t
  misc_feature (107)..(107): n is a, c, g, or t
  misc_feature (155)..(155): n is a, c, g, or t
  misc_feature (167)..(167): n is a, c, g, or t
  misc_feature (210)..(210): n is a, c, g, or t
  misc_feature (217)..(217): n is a, c, g, or t
  misc_feature (231)..(231): n is a, c, g, or t
  misc_feature (233)..(233): n is a, c, g, or t
  misc_feature (240)..(240): n is a, c, g, or t
  misc_feature (309)..(309): n is a, c, g, or t
  misc_feature (389)..(389): n is a, c, g, or t
  misc_feature (447)..(447): n is a, c, g, or t
  misc_feature (482)..(482): n is a, c, g, or t
  misc_feature (512)..(512): n is a, c, g, or t
  Coding DNA Sequence Number=SeqID_3061
ttttaacttctctacagctgcagccggangctcgatttgattacttcaacttgtcaatgaaacctcttctagatcgttaatctggttacatacattctcccatgtangacgactaggagaaatcaacgcttatcacgctactatatatacatacnaaacatcatagntgacaaagcgcgcatgtacaatgtcttgctccctcacatacanactgcgnacctacacataacnanaatatcncgccgctcgcatatccaaagccgtggccttctctatatctttattgaattctgcgtctcgacattgtgnctgcccctcacattctatcatacaaatcgcttgtccgctcttctctaaaactatcactttcttctctctcttttagctantgagattaatatattgccgtcaatgatagagagacactagtgatcatatctcatccgnttgtaccatcgtacccggcgcaaatctctaaccancaccgcgtaaacgtggcacgcatagatatntatgcgacgcaactaacacactcctagtat

SEQ ID NO: 12841 - DNA, 261 bp, Glycine max
  Coding DNA Sequence Number=SeqID_3062
agatagcagcgaagagagtatcggtgcttctcgtcacaccaaagggtcgtaacagaatataccgcaccaatccgtgctcgtcggtctccagggggtgttaaaaagccgttgaatagggggatggaatggcttggtcctacaatggttttgagggaactccaagggatggtcttggggggttaacccccccccgaaacaggaaaattaccccttgaatttaaaaaagcgccgggagggacaaatttgggtccgcacaccaaa

SEQ ID NO: 12842 - DNA, 558 bp, Glycine max
  Coding DNA Sequence Number=SeqID_3063
gacgttaacaaccaccttgacttctcccccctcacgcgcggcctccgcttctgcgcgtggcatggcgtggaatgcaacggccccaaagtgctgcgtctcgttctccaaaacttagatctcggaggcgcgtgggctcccaaaacactcacgcgtctcgaccagctccgagtcctcagcttgcagaacaactcactcaccggacccattccagacctcaccggcctcttcaatctcaaaagtctcttccttgataacaaccacttcaacgcctctctccatccctcactcttctctctccaccgtctccgaaacttggatttctctcacaacaacttctccggacctattcccgccgccttcaccaccatagaccgccacctcagcctccttataagcttcaactccttcaatggttcaatcccgccgtataaccaatcctctcagataatcgtccgagccaaagacaacaacctttccggagcagttctcgtaacaccgccggtagtacgtttagcaccttcccccttagcgttgaaacctccactatgaatcgaaatc

SEQ ID NO: 12843 - DNA, 597 bp, Glycine max
  misc_feature (149)..(149): n is a, c, g, or t
  misc_feature (187)..(187): n is a, c, g, or t
  misc_feature (324)..(324): n is a, c, g, or t
  misc_feature (335)..(335): n is a, c, g, or t
  misc_feature (340)..(340): n is a, c, g, or t
  misc_feature (362)..(362): n is a, c, g, or t
  misc_feature (412)..(412): n is a, c, g, or t
  misc_feature (430)..(430): n is a, c, g, or t
  misc_feature (500)..(500): n is a, c, g, or t
  misc_feature (529)..(529): n is a, c, g, or t
  misc_feature (546)..(546): n is a, c, g, or t
  Coding DNA Sequence Number=SeqID_3064
atcgattcccagacgtatgtgagtactatacccacccacacccactctcctgtctctacgtatccacactaatactactcatactgcgtcgtggtctctgtgatatacctcacactgacacacagccgacaccgcacacatcgacgcgntcgatgtttagttagttgtagcttcgcctcaaacagcntagacgaatagtgtaggttcgtgtagcgctgctgtatgccggcgctgtggatactatactcactcatgctctcaacccatctactcacgcatcgcacagcacaggtccactcgcggaacgcgccacctcaaggctancacagacacancaacnaacacttatgaagatacgacgnaagaacatgtactataaagactcataataatactcacacatatcagtaangacaactcgagaaactcnacatattgtgttccgcatctctctctgtgttcttcgctcgcgtgcgaatgctgctttgcctcttatgtcnctgattctgcgtgtgtctgttatcacttntgatgagagtgagtacnactatctcctacactctaccgctagcttgactctctcgttcttgtgtgctt

SEQ ID NO: 12844 - DNA, 528 bp, Glycine max
  misc_feature (28)..(28): n is a, c, g, or t
  misc_feature (59)..(59): n is a, c, g, or t
  misc_feature (61)..(61): n is a, c, g, or t
  misc_feature (67)..(67): n is a, c, g, or t
  misc_feature (97)..(97): n is a, c, g, or t
  misc_feature (111)..(111): n is a, c, g, or t
  misc_feature (143)..(143): n is a, c, g, or t
  misc_feature (152)..(152): n is a, c, g, or t
  misc_feature (181)..(181): n is a, c, g, or t
  misc_feature (203)..(204): n is a, c, g, or t
  misc_feature (245)..(245): n is a, c, g, or t
  misc_feature (248)..(249): n is a, c, g, or t
  misc_feature (263)..(263): n is a, c, g, or t
  misc_feature (297)..(298): n is a, c, g, or t
  misc_feature (300)..(300): n is a, c, g, or t
  misc_feature (382)..(382): n is a, c, g, or t
  misc_feature (486)..(486): n is a, c, g, or t
  misc_feature (492)..(492): n is a, c, g, or t
  misc_feature (498)..(498): n is a, c, g, or t
  Coding DNA Sequence Number=SeqID_3065
tgtgtgtatcaggtgtaagcgctaagtngactctccgacgcctccgcgcatagcatccntnctcgcntgtacgctacagcgtcgtacgtcagcgctncgccgcgtgtcagngcgcgcgtactgcgagaggcgatggtgcgctnacgctacangcgcgcgccgcgtgccgcgagctataganagacctatgtgggcaaatgcgnngacgtgacgtactctcggcgcgccagcagagcgcaccaacncannccaccagactacanagaagacaacagacgtaagtacgccagataaaannangcgccgcagaccagtgcgatgcaataacacagacaggacatacggcacgagtgtatagtgtctgtgcctatgataggagtanagaagagcgcatcctcctctgcctcgtgtcggcgcgtgcagagaaggtgtggatgtctgcatcgcctctcctctccgacatagtagacgacctactcctatcgnctctcncaccantctggtagagtaaataagagggcgcccgca

SEQ ID NO: 12845 - DNA, 411 bp, Glycine max
  Coding DNA Sequence Number=SeqID_3066
gagcaagagcgatgtctccgactgatccccgcctcctcttcatcctgtttgtcgtctttgccccggttccggccagggcggtcgacccgaccgtattggccacttttgcgggcatggggatccgcgtctccaccatggagttcgtcatcgacctggacgacctcaacatgaggcaggacatgctgataaccgtggcgacggcgagaagcatgaagagcgtcgagggactaaaggtggcgctcaagcagaccgacatcacggagctgccgacggaagtagtcctcctcaacttggtggtgccggagcggggctcctgcacgctggcgattcgagctgacaatttttatctgttagcatacacaaatgaccgtttggagtggcaggcattcctcgggagggagcacctggttc

SEQ ID NO: 12846 - DNA, 447 bp, Glycine max
  misc_feature (26)..(26): n is a, c, g, or t
  misc_feature (207)..(207): n is a, c, g, or t
  misc_feature (229)..(229): n is a, c, g, or t
  misc_feature (233)..(233): n is a, c, g, or t
  misc_feature (370)..(372): n is a, c, g, or t
  misc_feature (374)..(374): n is a, c, g, or t
  misc_feature (382)..(385): n is a, c, g, or t
  misc_feature (387)..(387): n is a, c, g, or t
  Coding DNA Sequence Number=SeqID_3067
tattagcgtcatctcccatctataanatccatatgtgtgtgtgtggacactctctacaacatattcttactgtatatattatgtatatgagtgtgtgaaagaatgtacatcatcctactccgctcataaaatatttatatatatacttattagcacatatcgtcaataacctatacaacatatagagcgcacgcagtgttccctcgnacgatacctatcatgtcagccnacanaccctctcgcaccgtctttacttcgtctgctgcagcatgtatgcgtcgcgtgtggtgaaaatcacatcacgagtatttaggtagtggtattaccacatacttccgtgaacgcactgaagttaccataaacgcggggnnngngggcggtnnnntncctcctcccgattttttacggctgactatcataacgtagctcttgttgcgtgactttgat

SEQ ID NO: 12847 - DNA, 457 bp, Glycine max
  misc_feature (68)..(68): n is a, c, g, or t
  misc_feature (257)..(257): n is a, c, g, or t
  misc_feature (269)..(269): n is a, c, g, or t
  Coding DNA Sequence Number=SeqID_3068
acaatttcaggaacggtaattcaattaccaatataagcaaatataaacacaaatataacacacattantaacaccaccacaaccaacaacatcattctcggacaatctacaaatccaaaccaatctacaaatcacaatgctacaaataatacctattctacaaatcctgctgcttctaattctagtaataatatcgtttcttctacttttgcgggatcttccattggaggtgggatctcacatttgggccaatctanaacaaccacgcntggtcaatctacaactcacttataccatcctacaaatgccaactcatcacttcctctccctctctctcatcatcctctcccacatccacttcctcttcatccacgtcccctggccagtatttcagattccagtttacaaacaaataatcatcatacgtcatcagatgccacgtcatcatctgcatcaa

SEQ ID NO: 12848 - DNA, 367 bp, Glycine max
  Coding DNA Sequence Number=SeqID_3069
cattagcagctgtattcctcctcctccgtaacgagatctcctgtgctgctctccgtctaccagggtcgagacaccatcacctcgtatcgccgacgtcctgcaccatcgtgtaccagtccctgggctagagggcatcttctactcttgaacctggtgagcctatgacttgtggaagacctacagccctcctcagagatgttcaagcacggagcatccatccggtttccaagaatccttcagtcatatgatgtgtactctgcagctgctgtcattcaagatgactgtgctacactgaagactgatactctgaacctgagagactttagtttctgccctagttccacgatccagtcagtcgtggaagctc

SEQ ID NO: 12849 - DNA, 452 bp, Glycine max
  misc_feature (60)..(60): n is a, c, g, or t
  misc_feature (162)..(162): n is a, c, g, or t
  misc_feature (174)..(174): n is a, c, g, or t
  misc_feature (202)..(202): n is a, c, g, or t
  misc_feature (356)..(356): n is a, c, g, or t
  Coding DNA Sequence Number=SeqID_3070
ccaacactagtggtgccagacacagatagcatctacaacggcgcgtcgctgtctgacaanttacaacatccaatcactcctcctgtaccgcgatactcaacgcctccaccgagcacgccgagcaagacgcagcatcaacgcgcagcggccaagcaacgccgncgcggcgcaccncctccccgcgccgcgcgcgcgctgcgcngggcgtggtcctgaaccactagcacggcgatctgggcaggaggacgcgacaaaaacaccacacaacggactacgacgggcgtgccgcacataccaccgaccaacaccgagacgccgcacacatacacggacgacgcgccggccatcggcgcgcnctgtcagcgaggacccgcactccgaccacaacgacacccacgcaaggagcactcattcggccggcgctagctggcggggtcatttctttcatcaaa

SEQ ID NO: 12850 - DNA, 457 bp, Glycine max
  misc_feature (41)..(41): n is a, c, g, or t
  misc_feature (45)..(45): n is a, c, g, or t
  misc_feature (137)..(137): n is a, c, g, or t
  misc_feature (192)..(192): n is a, c, g, or t
  misc_feature (238)..(238): n is a, c, g, or t
  misc_feature (386)..(386): n is a, c, g, or t
  misc_feature (388)..(389): n is a, c, g, or t
  misc_feature (392)..(395): n is a, c, g, or t
  Coding DNA Sequence Number=SeqID_3071
taagcacggcgacataataggatcgggaaggatgggagtgngtangtgtgagaaatattatgttgttcgtgtgtgttgttggctttgcgtctgtgtctattttctctccctcactttatgtcgatttctttttgtgntgtcataatatgatacacacacatctcgcctatattgtattcgtggcgagtcatntctgtttgcgttgtgtacatcaacccgattatgatcggacttaagnggagaggaaagtaggaactatcgcagatgcatctacatcacaagtcataacaatgggcggtggacatagctcgcacataagatggacagctaggtctcagcgatcgcaagttgcatagtgcatagtgatgttaagcggagcaatagancnncannnnatatatctctgtttctagtgttgttggtgatagtatgtccacgccaggtgtcgtcgggttgt

SEQ ID NO: 12851 - DNA, 454 bp, Glycine max
  Coding DNA Sequence Number=SeqID_3072
acagggcttggcatcatttgcaagggaaggcccttctctctcagtgtcatctaacaaaagtaattgcgaaactatgaacaagccggctcaaatttcgcgagaaagtcagaattatagtttaccgtcaaaggcatcgattgtctatgttgtatggatggagggtgggaatgggcctctattctgtctattaagttgcataaataattagtaaccttgaacattacaagtaataagtgtgaagagattgataaacaacggaactggattaaactcttaataatgttgtctcctgattgtatcctcgtggttgatgtggtctccaccgttatggggttctgccgtgcgcaattgagagcccccgcctccgtatctcgtcagccgaaggcgagcctcgtttgcaacgtagtgtcctctatatcgatatgttacatagtttttgccattgcgctctcct

SEQ ID NO: 12852 - DNA, 484 bp, Glycine max
  misc_feature (155)..(155): n is a, c, g, or t
  misc_feature (188)..(188): n is a, c, g, or t
  misc_feature (235)..(235): n is a, c, g, or t
  misc_feature (286)..(286): n is a, c, g, or t
  misc_feature (291)..(292): n is a, c, g, or t
  misc_feature (296)..(296): n is a, c, g, or t
  misc_feature (313)..(313): n is a, c, g, or t
  misc_feature (321)..(321): n is a, c, g, or t
  misc_feature (353)..(353): n is a, c, g, or t
  misc_feature (355)..(355): n is a, c, g, or t
  misc_feature (420)..(420): n is a, c, g, or t
  Coding DNA Sequence Number=SeqID_3073
tttgttccgcgcacactggttgcgcccgtttagtgttgtggctgcgtaattctcattgtcacgtcggcttcactagagacacaagtataatatgtttgacgaggagggtagcgtcatcctcatcatcatatctttcgccccccaccactctccanttgcgctatcgcgtcgttgactcagacacaacncctcattctctcctcattctaacccccatccggtgcagcgagcgcgncgtgccgaggcagcagtgctcgctcatcgtctgttcacatcttcgccgtangcgcnnatcntcccacccacgccctcnctcgtctntttattcttgccgcgagtgcttgccgtgtgcncnttggttgtaggcgtgtaatggacgatgcgagatgagaaggagagagagcgagaattgtgttgtgnagaataccctccctgcgagttctcccgcggggggtgtatctctactacattttccacataggag

SEQ ID NO: 12853 - DNA, 230 bp, Glycine max
  misc_feature (84)..(89): n is a, c, g, or t
  misc_feature (131)..(135): n is a, c, g, or t
  Coding DNA Sequence Number=SeqID_3074
tgggattgttaaaatttagccaattttgggaagatggttgcctgctttcgttatgcttcaattcaccttcattctgtttatctnnnnnnatctaaacttgaattcaactatgatagtcaggactggctacnnnnngaagcaaatgagctgcataacaaggctgaaatactgtttagtgaagtgtgcaacacactgcatcaaatttcagagaaggattttaggaatctaat

SEQ ID NO: 12854 - DNA, 326 bp, Glycine max
  misc_feature (186)..(186): n is a, c, g, or t
  misc_feature (199)..(200): n is a, c, g, or t
  misc_feature (211)..(211): n is a, c, g, or t
  misc_feature (239)..(239): n is a, c, g, or t
  misc_feature (243)..(243): n is a, c, g, or t
  misc_feature (251)..(251): n is a, c, g, or t
  misc_feature (274)..(274): n is a, c, g, or t
  misc_feature (277)..(277): n is a, c, g, or t
  misc_feature (279)..(279): n is a, c, g, or t
  misc_feature (293)..(293): n is a, c, g, or t
  Coding DNA Sequence Number=SeqID_3075
tctgtccaacatgtgggaacttgctgcgttacggtcaatcacagttcttctgctcgacatgtccttacatcgcccgcatagaaagacaggttgagataaagaagaagcaattgctggttaagaaatcaattgacccggttgtgaagaaagatgatataccaaaaggacctgaaactgaagcaccgngtccaagatgcgnncacgacaaggnatactttaaaacaatgcagattcgttcngcgnatgagccncaatcgagattttatagatgcgncangngcgagcaaacttgncgcgaggaatgatcatccctttatacttttcca

SEQ ID NO: 12855 - DNA, 489 bp, Glycine max
  misc_feature (89)..(89): n is a, c, g, or t
  misc_feature (180)..(180): n is a, c, g, or t
  misc_feature (192)..(192): n is a, c, g, or t
  misc_feature (211)..(211): n is a, c, g, or t
  misc_feature (218)..(218): n is a, c, g, or t
  misc_feature (292)..(292): n is a, c, g, or t
  misc_feature (305)..(305): n is a, c, g, or t
  misc_feature (356)..(356): n is a, c, g, or t
  misc_feature (389)..(389): n is a, c, g, or t
  misc_feature (393)..(393): n is a, c, g, or t
  misc_feature (407)..(407): n is a, c, g, or t
  misc_feature (441)..(441): n is a, c, g, or t
  misc_feature (459)..(459): n is a, c, g, or t
  Coding DNA Sequence Number=SeqID_3076
agcgtacgtacgactagggatatactcgtaactgtacagatatgtacgaatagtacgaccttgcgtcagatgtagtagtacgctcggangtagatacatactaatcgatctgacgtcacccagatgctatgatagaagcgcgatcatcggatgcatcacatcataagatagatatggggnatagctgcggantgaacacaccgagatgaanacagtantagcatgagctgtgtgacgtcagttacactaagagctgtacgcgtgagtcgagattacgtgtagcgagttgtanacatgcactaatntaactctatttacgttcgtccgcgtgcctcatagtagacgtgcatatatgngacggagcaacgcgactgactgaatcggatacngtantgctgcgatattgntaatagtgcgtcgataatatgagagagcagaacngcgactacaagggtctcnactgtgatgtacgaacactatggtcatgta

SEQ ID NO: 12856 - DNA, 310 bp, Glycine max
  Coding DNA Sequence Number=SeqID_3077
aatatccggtatgctatggctcacaccatacggcttgcattcttgcaaacgacttaaccactaatggatcacaactaccccgagggagatcatgtacatcagaaaaatgactagaaatatattagaagaccacgagatcgcagactcgccgaaaaacatgactatcagacctctgatttgctagctcctgaatacatttcatcgggtagacgtcttatagactcgagagttctaaggggtttgaatacatgatagtgagctagtatgcgtagaaacgcagtgtttgatagtccaaatagagtccaaaatg

SEQ ID NO: 12857 - DNA, 512 bp, Glycine max
  Coding DNA Sequence Number=SeqID_3078
tcttattcataaaactccgagtccatgacctcctcatacaaaaagtacttcgaccctgcccaaatcgaatctgaccaaaaggatctcgttgtttcccaacttaaggctgaactcttcgaacttcgtcaaaatgaaagagattataacgaactccactccaagctcaacaacctcgagcatagatacaaccttcttcaagaagaaaagagtttaaatgaacgtgaattcaaaaacagaaatgagctcaatctcagaaccatcaacaacttgaaatctgatattgacgctttaaagcaagaactcaacgttcttagtgctgatgctcaagatctcagattcgataaccaaagcatcaatgaaattgtcaacaacagatcttctgaaatcgctcaattgaaggctgaactcggagacttggctgataacaatgctcacctctctatggagaagaaggacttggaaacccaaatctctagagtagaactgaaacagagaacccacctcgaatggaa

SEQ ID NO: 12858 - DNA, 588 bp, Glycine max
  misc_feature (496)..(496): n is a, c, g, or t
  Coding DNA Sequence Number=SeqID_3079
agtcacttctgcacatatgctcaagccgctgctctgcctcctttactagagagccgcctgtgagaagcgggactacacgaatcacaaccatatcgacgatgactagaagcagcccgacccaaacacctctcactatcttatcaacccaccgcaccgtcacgaggcggcaaaaaaactacgacgcgctccatgtaccagcctccgacccggacgcaccatgcgcgtgcgggcgttccacacgacgaccttgcatcctgtgatcgagccggcaccgcgtagacgtacgtccgctcgatgcgcgtcgcagatctgatgcgcccaaccacgccccaaccctctacaaccactgtaatctcaaaacaatcatatgccaagatgtagcacgtaaagacaagaaacatccagtcaacatcacacgtataagaaaaatcatacacgaatccacaacacactacgaagcaaacctctgagaccggcgaatcgtcggatccgctanacacctcgcggataactcgtcgggcaaacatcgacgaggcgaaatgtgaggactaatactcctcgtcgatgttgctctctatcagtccacag

SEQ ID NO: 12859 - DNA, 340 bp, Glycine max
  misc_feature (56)..(56): n is a, c, g, or t
  misc_feature (112)..(112): n is a, c, g, or t
  misc_feature (121)..(121): n is a, c, g, or t
  misc_feature (151)..(151): n is a, c, g, or t
  misc_feature (153)..(153): n is a, c, g, or t
  misc_feature (158)..(158): n is a, c, g, or t
  misc_feature (170)..(170): n is a, c, g, or t
  misc_feature (203)..(203): n is a, c, g, or t
  misc_feature (219)..(219): n is a, c, g, or t
  misc_feature (242)..(242): n is a, c, g, or t
  misc_feature (247)..(247): n is a, c, g, or t
  misc_feature (264)..(266): n is a, c, g, or t
  misc_feature (281)..(281): n is a, c, g, or t
  misc_feature (313)..(313): n is a, c, g, or t
  Coding DNA Sequence Number=SeqID_3080
tcatatcatgtcagtttattctcatagtgagtgtatattatctgtgtatgtagctnccagactctcaacacgcacacagttagctatgcagcatcatataggtacacgtatncactaccanaattatcctctctgtcgccgctgctctgcntngtgcncactctcacagngtactcactctcctctacgacgatggtcacttngtccccctgcacagcnagcaccgccacacatagctgatnacacncacacccgccacgacgnnnctcagcgactgccgnaatcatactagatagttatgatataatcatcnacttcacatacagtcagacacatactc

SEQ ID NO: 12860 - DNA, 535 bp, Glycine max
  misc_feature (26)..(26): n is a, c, g, or t
  misc_feature (487)..(487): n is a, c, g, or t
  Coding DNA Sequence Number=SeqID_3081
caacatgcggcagtgtggagtgtacnacaatggaggaaacgaaggagtaaatacgcgaatagcgctaaaggcgcagtggtattgagagtcatcgcattgcgtgtcagctaggcgcggtgtggctgctcgtggtctcattatgagtctaacacaggtatctacaatgagcacaccgcggctgaagtaactagagcagaggcgcgaacaaaagtgcgcggcatagggggaaagggcgtaacaggatattcgtgagaagcgtggctgacaatcgtgtgcaatatcatccgctcactctattggggaggttggtatgcttctatagttgctatcactgcccccttctctcagctgtggaggaatagcaagaacaccgagcttgagagtactcaaataaatgattataatgagagaatagaagagatagtgtaatctgcgctgtcatgccgtgcgggaggagcatggaggattaatatcacactaagatgcncggcgccgcgcccgcctcagccgcgtggagagtgtaggcgacccttct

SEQ ID NO: 12861 - DNA, 559 bp, Glycine max
  misc_feature (68)..(68): n is a, c, g, or t
  misc_feature (139)..(139): n is a, c, g, or t
  misc_feature (151)..(151): n is a, c, g, or t
  misc_feature (156)..(156): n is a, c, g, or t
  misc_feature (235)..(235): n is a, c, g, or t
  misc_feature (240)..(240): n is a, c, g, or t
  misc_feature (272)..(272): n is a, c, g, or t
  misc_feature (300)..(300): n is a, c, g, or t
  misc_feature (352)..(352): n is a, c, g, or t
  misc_feature (375)..(375): n is a, c, g, or t
  misc_feature (400)..(400): n is a, c, g, or t
  misc_feature (483)..(483): n is a, c, g, or t
  Coding DNA Sequence Number=SeqID_3082
tgaccgatcaccgacgtatacgagcgctctcctcagatagccacttgtagtatatatgagatcatcgncacattctaccactccataccatataatctcgatactactataccgtgtacctatgatatatataaaacancaggacttattnacaanatctgtaccgtctctcacacgcaactatcgactaacacgagatcatcactatgacgatagtctatcactactcgactanccacnatagcaagactatatctcttcatcgattatantctattagcgtagcgcgtctctcatctntcgtcttttgcgatagtcttaatacagactatcgtcatgcactccctctatnttactcagcactcatcaccgtantgcatcgttcgcacacacacgctcnacgtacagctaccgtaccactactcgaccgtcaagagactcgttctatctctgtaccttatactgctactgagtatctatctnacatagtaaacgatgatcgcatctatcgctatatgcgagacgtgctaaccctaatacttcgcacggctcgatgtcc

SEQ ID NO: 12862 - DNA, 424 bp, Glycine max
  Coding DNA Sequence Number=SeqID_3083
aaagactaagagtatcaccttcatgatggccgcccaatcagggctgccatcatgacgagcaggaagaatcaggttaatagggcatttgatggaatcaaagacctcgggcttccctacaagcaaggtgaagataagcgccaaatcactatgtactttttccttccagaaacaaaagaggggatgctagctttggctgagaagccggcttctgaataagggtacttggaacgcaagcttcctaataacaaattggaaggaggagacttcaggatcccaagatccaaaatttcttttgggtctgaagcctctaatgcgctgaaggaactgggagaggcaatgcctttcaccgtcggaggtgggacagaaatggtggaaacagctgtggaacaaaactcgtttgagtccgatatattgcataaggctt

SEQ ID NO: 12863 - DNA, 318 bp, Glycine max
  Coding DNA Sequence Number=SeqID_3084
tatgccccggctcacaaggactgaggatgaccgatgagtcaacaccttttctcccgaaggccgtttgtttcaggttgtgtatgcaatctaagccatcaagctgggatcaactgcgattgggttgaagaccaaagatggagctgttcttgcaggttaaaagcgcattacatcgtcgctcctggagcctaatagtgttgagataattatggtatttgacgagcacatcggttgtgcaatgatgtgggttgattgcagatgctcgaacacttgtgtgagcatgcacggttggtaactcataatcacaaggtctgctatggt

SEQ ID NO: 12864 - DNA, 272 bp, Glycine max
  Coding DNA Sequence Number=SeqID_3085
acctttcttcataggctcctactgctccacatcagtgccctcctctgtctacttacttgagcatacgcacaccatgtgcggcggcgcgatcatctccgacttcatcccggagcgcgaccaccgcggcggcagcaagcgcagcctctgcaccgccgacttctggccgcatgccgccgccgccgcgttcgacgaccctaccgaccaccacgacttatacccagccgacctgaccggcgccggcgccttcccgccccaacaccaagcagaggagg

SEQ ID NO: 12865 - DNA, 348 bp, Glycine max
  Coding DNA Sequence Number=SeqID_3086
acgttgtgttcggacaggtcgtcaaggggatggacgtcgtcaaggaaataaaaaaggttggatccagctccggcaggaccgccaagcctgttgttgtccccgactgtggtcaacttttttagatagacgacgttgaccctaggcttttatttttgtgtcgggggctctgaaagtgtcgtttctttcggggtggtttttgccttttttttttctttcccaagtcgtttaggggaatgcggtgttatggaaatcattttgaaacccttcccctttgaaaccttcctttcctttttaaaaaatcaggatcatgtggttcgttcaaagagggaatggagtttgttattagaa

SEQ ID NO: 12866 - DNA, 170 bp, Glycine max
  Coding DNA Sequence Number=SeqID_3087
tcatatttggcgcactgttttactacagccattgacgtctggtctgttgggtgtgttttagctgagctgcttcttgggcagcctttgttccctggtgtgtgtggtgttgttgaggtggttgcgtttttcatggtgatctttgtgctttctccctctctttgttcctgtct

SEQ ID NO: 12867 - DNA, 572 bp, Glycine max
  misc_feature (415)..(415): n is a, c, g, or t
  misc_feature (420)..(420): n is a, c, g, or t
  misc_feature (431)..(432): n is a, c, g, or t
  misc_feature (434)..(434): n is a, c, g, or t
  misc_feature (439)..(439): n is a, c, g, or t
  misc_feature (450)..(450): n is a, c, g, or t
  misc_feature (456)..(456): n is a, c, g, or t
  misc_feature (459)..(460): n is a, c, g, or t
  misc_feature (463)..(464): n is a, c, g, or t
  misc_feature (486)..(486): n is a, c, g, or t
  misc_feature (492)..(492): n is a, c, g, or t
  misc_feature (495)..(495): n is a, c, g, or t
  misc_feature (500)..(500): n is a, c, g, or t
  misc_feature (507)..(508): n is a, c, g, or t
  misc_feature (517)..(518): n is a, c, g, or t
  misc_feature (525)..(525): n is a, c, g, or t
  misc_feature (528)..(528): n is a, c, g, or t
  misc_feature (535)..(535): n is a, c, g, or t
  Coding DNA Sequence Number=SeqID_3088
gcctcttgcaaaggaacttgcatccaaatggttttttaacaaccactgctcaacgttatgccagatcatctggcttgaccagccgaatagggaatggactgaggtcctccattgaagcttattgtatatgatgataatacatcacaggtggaggcaagatatccagctattctttttaaaacaacaactaactgcttgcgtagagaagatttttggccttatacgtgataatttgaaaaaggagctgtctccacttctgggatcatgtattcaggcacctaaggctaaaatgggtcgagtgcaaggtggaaaatcatctagatctcctggtgggcttcctcaacaatcacctgttgctcaatggacaacatcatcaatttttggattctctcatgaccgctatgtcaaatcatgntcctncttttcatccnnanctagnactcaggtttntcttcnaannttnnttcttcacaacctttgtggcgngggaangtnacttntaaatgnnatatggaanntgtctgnaanttgaaanggtgcaatgcaaaaagatttctgaacttctggatggt

SEQ ID NO: 12868 - DNA, 357 bp, Glycine max
  misc_feature (26)..(26): n is a, c, g, or t
  misc_feature (54)..(54): n is a, c, g, or t
  misc_feature (56)..(56): n is a, c, g, or t
  misc_feature (58)..(58): n is a, c, g, or t
  misc_feature (60)..(60): n is a, c, g, or t
  misc_feature (64)..(64): n is a, c, g, or t
  misc_feature (115)..(115): n is a, c, g, or t
  misc_feature (120)..(120): n is a, c, g, or t
  misc_feature (225)..(225): n is a, c, g, or t
  misc_feature (247)..(247): n is a, c, g, or t
  misc_feature (251)..(252): n is a, c, g, or t
  misc_feature (257)..(257): n is a, c, g, or t
  misc_feature (284)..(284): n is a, c, g, or t
  misc_feature (286)..(286): n is a, c, g, or t
  misc_feature (323)..(324): n is a, c, g, or t
  Coding DNA Sequence Number=SeqID_3089
aagatgatatatgtctgtcatctacnagtagtatagacaacgagatacagaaantntnancctntcatgtgagttctaagctcgctacgtgagtgatcagagtatacgtgtagtngacgngcctcccgacgcactatcatcgcaatactggtcgtgaactacatactatcattactgtgtgttgtatgtatggacgagtgcgatgtgttgatagtggtcggcatnaggtgtagagtcgctggcgtgntttnnccgtnttattagctcatcatctcataataaananagatcgaccgaacacgcgcgcgagacagaataaaaannatcgcagcgctgtacactccagcgcgcattagc

SEQ ID NO: 12869 - DNA, 337 bp, Glycine max
  Coding DNA Sequence Number=SeqID_3090
tgtctacttcaaccctaatttttatttcttcagaagactcacaaaataaaaagacactgaattgttctcgcagtgatcacattcccctccgaaatctgagtcagagttataacagcgtgatgggtgttcctaagcataaatggagtcaaaaagaagagtcagctctaagatctgccgtttccaagcacggccctggtagatggcgcaccatcctcaaagaccctgactttagtcaagtcttgttccttcgttccaatgtagatcttaaggtcatctcatcaccccttcttgatcctttctctcaactttatagtgattcagccttgttttgtttttg

SEQ ID NO: 12870 - DNA, 461 bp, Glycine max
  misc_feature (38)..(39): n is a, c, g, or t
  misc_feature (51)..(51): n is a, c, g, or t
  misc_feature (268)..(268): n is a, c, g, or t
  misc_feature (368)..(368): n is a, c, g, or t
  misc_feature (370)..(370): n is a, c, g, or t
  misc_feature (372)..(373): n is a, c, g, or t
  misc_feature (375)..(376): n is a, c, g, or t
  misc_feature (406)..(406): n is a, c, g, or t
  misc_feature (413)..(413): n is a, c, g, or t
  misc_feature (418)..(420): n is a, c, g, or t
  misc_feature (422)..(422): n is a, c, g, or t
  misc_feature (424)..(425): n is a, c, g, or t
  misc_feature (433)..(433): n is a, c, g, or t
  Coding DNA Sequence Number=SeqID_3091
tttcttgtctcatatatcctggccgtctatgccttctnngttagctttccncccactcctgtgtgctgtcttctcttcctctcacaccatatatttcctctatgacatcataatactctgcttttattgagttatattatgtcgcattctcatctgaagagaaataggtaatacagtcaacaaacttctatctctcaactttatctcattctttgtggttcgcttttgttacttccataattctttatctctgatgatagattcctanatcttatactgtatgataggttagttatataattacatttatcttctctgtttacagctgaccgtaatgttattgtgttgtctctcttccacattccttntntnntnncacatacactacagatgaacacaatagagnaataganaaaannntngnnttccctanggcacgcgtgcgatcttgacgcatggtg

SEQ ID NO: 12871 - DNA, 248 bp, Glycine max
  Coding DNA Sequence Number=SeqID_3092
gattcatctgcaggcatatgacccattgaaattagtaaatagttcagagtatatatgtttgtgtgtgtgctttttggtaactaggtttctttttcaattggcattgttcagtagtggtgttcatggttttggacttttacttaatgcgcaagaatttatatggtgtgtttatagctctttaccatgtaaagctgtcagagagagctgaaatttggtgttttttggctttttaatctgggaacgtcaat

SEQ ID NO: 12872 - DNA, 244 bp, Glycine max
  Coding DNA Sequence Number=SeqID_3093
gacacgcaataatgtttaccaatcaaaagattagcaacagtatcaaaaggatccccatcctgttaagtacaatgaattgcttcctaagatggcccacgggcatccatggttgcaatcttttgaacaaggcaccagcaccacaaggatcagtacaagcattcatggttacagtcttctgaacaaggcaccatcaccacaagcatcagtaccagagacatttggaactttgtcacgacgatgagcg

SEQ ID NO: 12873 - DNA, 470 bp, Glycine max
  misc_feature (310)..(310): n is a, c, g, or t
  Coding DNA Sequence Number=SeqID_3094
ggtaatggtatttcatctacaacacaagatcaactgaatgagtaacgagaacacactaaatagatgactgcatgatatcataggatcttgaataggtatgttgccgacaaggtgtcgttgggccgtgccgtgggtagcacccgacactcggctgggtggaagcgattgcggtgggcgacgggtaaataccaaaagtaaagcagggggagaagggcgggcgagagagcaggagagatggatgtggcgacacgagtgataggtggtggatgtggggaacaaaggaagagacacgaacggatagaggcggagntgcgaaatcgtaataatcggcaaaataataaaggccacccaccaaagcgccggatggatggagggatgcgcgggtgtgtggtggagagggcggataaaagatcaatatagaaccgcaccaagaggtagagaacgcggatagatctcataacataccattt

SEQ ID NO: 12874 - DNA, 535 bp, Glycine max
  Coding DNA Sequence Number=SeqID_3095
cgtatataactagtgggcgggcattaataactggggggggggaagaagaagaaaagatccgtatgtgcggagaaacgggatatgcgttggcatataataatatttattctgacgcgggcggtctctattgctgggggggaaaaatttaagcagcagaggaggtgataaaagaggttatttgttgtttggggggggggggggggaaaccacccgcggcttctaataaaggctggaatactagaagagatacgatagcgggtagggatataaaatataaggggggagaagagaaatttttaatttcttagcgggatgttttggtggaatcgtggggtaagaatataaaatagtaggggagagtaataatttggtgcggagatatgtgtgcaatccctggttggggtggaaagagtttattgtttgtgtaaggcggggatcgttaacaaatagttccacttatcatttggggacggaggagaaagggtacaataatctggatataaggaggaggagcgggattgaagatcgaacgcaa

SEQ ID NO: 12875 - DNA, 448 bp, Glycine max
  Coding DNA Sequence Number=SeqID_3096
atcctcgtacctcagcaatttctttcgatgtccgcgttctttctaattccattttcgtcaattgtgggtttctggcctcgttcccggcaggtttcagggtttgagcatgagtcttttgaatgacgttcaggaattcattgaagcccatccggtctgttcttccggagacattgcggatgcttttgcaggttactcacggcagcgcgttctgcaaaaaacaagcaagttacgtcagagtggtcgtgtggctcaccgttgtgaaggtgatgcacgcagacatttcccgcgcctgagctgagagagcgcaggatccggagcctctgccagttcgtgaaaccagacctgtgctcaatttctatgtcggctctaacgacccgcgggtgattttgtgcctgtccctccaggcggagctcttccgggtcaaaaggtttgtcttctgcgagttcag

SEQ ID NO: 12876 - DNA, 508 bp, Glycine max
  misc_feature (183)..(183): n is a, c, g, or t
  misc_feature (336)..(336): n is a, c, g, or t
  misc_feature (346)..(346): n is a, c, g, or t
  misc_feature (444)..(444): n is a, c, g, or t
  misc_feature (458)..(458): n is a, c, g, or t
  Coding DNA Sequence Number=SeqID_3097
ggatattgattctcacccacgatggcaatgcgcgcgcgacgcgccaagagatgacacgccggctggcagtgcacctacgcacccgtcaggacgctagctgtcgcgtagtacgcccaccattgcatgtagagtgagtacttaggcttcgccaactatcggtcgtactgattacacacatgcagngatgatactgtcgtgcaggacagcacacgtcgagccgtcaccgcataccagagaggacgtgtcggcccgcgctacgacgagaggagactggacgtactcatcgccctccatcatatcgtgtatcctccacctgtcgtgaacactagagactanctcggtgagngcgcaaggcacactcctcggccatcagcgtgacaaacgaatgcgtcacacacgcggccacgacaagatcggtgagtgaatggagatgcagaggagagngtgacacagaggtngtagccgcgcgctcgcccctctgtctagcgtcctgtgatggctccgtagg

SEQ ID NO: 12877 - DNA, 100 bp, Glycine max
  Coding DNA Sequence Number=SeqID_3098
gtatatcttgagaacgttacgtccccaaatatgtatcatccgcagcgtgtgataggatatatgttatgagtcggcgtcgcatctcgtattgacagcaaca

SEQ ID NO: 12878 - DNA, 564 bp, Glycine max
  misc_feature (404)..(404): n is a, c, g, or t
  Coding DNA Sequence Number=SeqID_3099
tgttgcggcctcatggtcacgatcaggtcagatctcttccgctagctcgctagctctacgatggccctccctacgtcgagactagacccttctccgccctcggactcactatcacgtctctcataaccgcctcctacactatctaagtccatgggccacgcgccgtgactgcctccgccatgcactgctctcgagcttcgcgctccataaacactcgcatcatattcactagagccgtctgccgtacagacctctcgtcctggctctgcctcgcgctctctatcccctgcactatatcatcctgcgacctgtccgatccgcaacctcgctaaggtacaccagttacctgcagcttcttacaggtatcgttaccactctcctcatgcggacgatgagaagacaantgatagtctcatacctttgtgcggacctactgagtctatgctagtgttaagtggtgctacgtgccgagcaaaaccacgcacgactcggcggctaccctattagtttcgaagacgccccgcccgcccacgcgacggtggcacctacccatcttattagcta

SEQ ID NO: 12879 - DNA, 174 bp, Glycine max
  Coding DNA Sequence Number=SeqID_3100
ggaatttaagccataatttcttgaatggacccattggcaatgtgtttactggcttagataatctcaaagaaatggacctttcgtacaataatttcacaggtgatctgccaagttcatttggttccttgacagaccttaatagattgtaagtttctcgtgttagtttgatcggta

SEQ ID NO: 12880 - DNA, 575 bp, Glycine max
  Coding DNA Sequence Number=SeqID_3101
actaacagagcgtctttgactgcaaagctcggtgatacacagaacgcataaaccgagataggataaattaatgggtattcgccccccagaagttggtcgagtgagccgtctcgacgcgcatgccagtgccccccgcgtcatttctgcccccgcgtgagccacttcacggcggcctgcctcggaaggcgggagtgcgcgggaggagaagtaatcgcagcggctatcgtagctctgaacccccgcgccccatggcccgtcccgtccgtgcccccccttcttcctgacatagcttcagctcacaatgcggatgccccgccggcaggacttcacccccgctccgccatccccggtggctggacgccgcgaagctacgtatggggattgctgtgtcaccgggcagcacgaaaaatattttgtctggtgcgagttgaggaatcattactaggataatcgctcttacgtatgaaattacctgccagcccgcgggggtatctcagctagtttatagaatccggcccgcctacacggcggtgcgtagcccccaggttttgagtggcgccggtgttccactcatc

SEQ ID NO: 12881 - DNA, 510 bp, Glycine max
  Coding DNA Sequence Number=SeqID_3102
gaaatctccaacgttcacagacttaacttgagacaattggctcccggtggtcacctcggaagattcatcatctggactgaatctgccttcaagtcccttgataagatcttcggaagctacagattcgctggacaagaaaagagcggatatcacctccacagaaccgtcttgaccaaccccgatattgccaagatcatcaactctgatgccgtccaaagtgccgtcagaaaccaaagagacaacaaggctcttcactccgtccaaaagaagaacccattgactaaccacgctgccagagaaagattgaaccctcactctgccaccgttagaagaatggaccaacaagccaccgccaacaacagaaccaagagagaactcgctcttaagaacaagagaggtatctccaagagcagaactgctgaagaaaaggctgaacacaagaccagaagaactgcctccagagctttcatggctggtgttcaaaagaacctcaacgatgctcacaacaga

SEQ ID NO: 12882 - DNA, 547 bp, Glycine max
  misc_feature (97)..(97): n is a, c, g, or t
  misc_feature (290)..(290): n is a, c, g, or t
  misc_feature (313)..(313): n is a, c, g, or t
  misc_feature (365)..(365): n is a, c, g, or t
  misc_feature (489)..(489): n is a, c, g, or t
  Coding DNA Sequence Number=SeqID_3103
agtgtacatctcattgacgcgcggcttgtctagtcagacggggtgagatgctgtgaggaggtgggctgatgtatgtgtgtagtgtgaggatttgtgntgctgcttgtgactagtccacatagatgtctgtatggtgtgagtgttttgatgggaatgacggatcaccgatctgatgagggagtgcgagatggtagaggaatgtcgtatgtaagcacagacgaggcagttgagagtagtggcttgccctcgtcgtgcgtgactacagacttgtgagtgcgataaacctcganctaattttatatctgattcacgnatccagcatagtgattttaatagagagtggtcacatttgaggaattagaagntgagatgctcataaacctatgatcatcgatatgatatataagagttaactattgttgactgattctaccagacatcgccgatagagagcgtgactatagtatgtgtatatcattctacgtactnacgcgagtaggtatatgagagatcgcttctatacgtctcgtcacgtagagtatctgcg

SEQ ID NO: 12883 - DNA, 353 bp, Glycine max
  misc_feature (30)..(30): n is a, c, g, or t
  Coding DNA Sequence Number=SeqID_3104
gtgacaggctacactgacccctacactggnaaacaaaatctccctctttcaagccatgtaataaagagttgattgtgaaagaccatggtatccgtctcctagaagcacagattgccactggtggtatcatcgaccctgtgcacagtcaccgagtccctgtagaggtggcctacaagagaggctactttgatgaagaaatgaatataatactttctgaccccagtgatgacacaaaaggtttctttgatcccaatactcatgagaatctcacttacatgcagcttctgcagagatgtgttgaagacccagacacagggatgttcatgttggatgtgaaagacaccaaagcctct

SEQ ID NO: 12884 - DNA, 546 bp, Glycine max
  misc_feature (54)..(54): n is a, c, g, or t
  misc_feature (127)..(127): n is a, c, g, or t
  misc_feature (139)..(139): n is a, c, g, or t
  misc_feature (210)..(210): n is a, c, g, or t
  misc_feature (240)..(240): n is a, c, g, or t
  misc_feature (393)..(393): n is a, c, g, or t
  misc_feature (520)..(520): n is a, c, g, or t
  Coding DNA Sequence Number=SeqID_3105
cttctcgatgtctagctaactctggtggaccgtcgagagctcgatgtggcacanctcagattaatagatggtcttcattgatagcaggtgtgtgcgcggtgtgggttcttcactcaccaagtagtanactgactctggntggtattacttcccattgacaatcgttatagagagaaccggcccgtgtggagagacacaactctacctgcncttcagtacgacacgacatacgactatatntgcagataattctagtgagatgcatcctcctactatgcgtcgtctctcgtactgtaactagtgcatattatgagtgaatcatctttccgcgtgcatcgagagacggattgagtcgttatacaatcgcatcgtagtagatgatccgagactcgncggtcgacaagttagcagagtatcgcgcacacgcacaccaccccaagaatagataagcacaacgacgaagggatgactcgcattcgtgggcttgatacaccgcgagactccgacctggcacgttaancgacatatgccatctagccagaggtg

SEQ ID NO: 12885 - DNA, 531 bp, Glycine max
  misc_feature (305)..(305): n is a, c, g, or t
  misc_feature (334)..(334): n is a, c, g, or t
  Coding DNA Sequence Number=SeqID_3106
tacgccgctactatcgtagatttagggtgcagccagcacagatcgttgtctcatactactgctggccatgacaggaggtagagagtctgagtattcatatgctgtatatatcacaaatacatcgttcttcgttctatcgacatcgcgtgcgctggagagatctagttatattaagtagtgtgtctgtcgctctccatgaaatttccgttccattggtgttagatcactgtcaggaacaagcagtgagtgtggacaggtagatgtactgcgttgtggcgcgctgtagtgtatagtccgtgggacgnctaatatacatcacacgtatactattatngagaatgacgagctatagtcagtatatctatacttcttacttgcttgcagacatttttgtccaactatagagcaacatctccctactcacacgaatgtgcagattaggcggggggtgtgggggcacctcattaatcataccctccgctttctacgagaggaggaggcgcgtcggtcacccactagctatctgactgt

SEQ ID NO: 12886 - DNA, 499 bp, Glycine max
  Coding DNA Sequence Number=SeqID_3107
aggcggtgcatagctgtggtatcattatgaggcgctggccgccgcccgtggtcagtgtaaagagactcgcgtgtggttgcgtgtgtcaaacaggtggctaatatatttggcggtgtcaatctttacttatactagagagtgcggttgttataatcgaacctgcgcgccgcgaatacttgcgcacggtggacatccaacgctatgtgggcatatagatttcgtgatctgggttgcgttgcttgctgtgttgtacgagatctgcgggaagactatagtaacgttgccgttcaaataaataaagcgagagatcactggtcgcgagtagacgctcctaccgatccgcttgaggattaaatatcccccgcggggcgggttggggtgagcagggtcagtcgatctgtaaacaatgtcagcgagtcttacgtgtctccacgcaaccacacctcgatagcctccgcggccaacgacgagctcgcgtgtactctttcgtctatctcaa

SEQ ID NO: 12887 - DNA, 208 bp, Glycine max
  Coding DNA Sequence Number=SeqID_3108
ggcgtctaaactaggatcccggctgagctgtcccttacttcgttgtgcttcgcctctggcgttcaaaggatttgcgtttgtgctgaaggctgtgaggccaacttctacactctcagctataacatttgcaccgttcgtgaaccctctctctctctccaccacacgcgcgcgcaagtctcgatcaagagcgccttctcaaggactcttg

SEQ ID NO: 12888 - DNA, 588 bp, Glycine max
  misc_feature (26)..(26): n is a, c, g, or t
  misc_feature (117)..(117): n is a, c, g, or t
  misc_feature (170)..(170): n is a, c, g, or t
  misc_feature (353)..(353): n is a, c, g, or t
  misc_feature (370)..(370): n is a, c, g, or t
  misc_feature (427)..(427): n is a, c, g, or t
  misc_feature (453)..(453): n is a, c, g, or t
  misc_feature (518)..(518): n is a, c, g, or t
  Coding DNA Sequence Number=SeqID_3109
gctacgatcgttgcgcctatacattnactctctattctgatctgcagccgttgctggatactctcgtctgagacacagaccacctcgcgcgacgccacttcgactcactctatctcntgtactctttatacacggtgcatcacttcacttcactgatcaccgcatcgagnctcgcgacgcgcactcagtatgtatgtgcatgtatagttcggactggcgcgtggcgatagacgaggcgtgacgcgcgcgcgtatctcatgccgctgtactcttatcgcatagttcgtacgatgtcaggacggctccttattgacgacgcgcgtagtatgctccttgtcgtgcgtatatacgcntctactacgcgcatctncatgtcgctacctctctcgaacggttcgtcgagcgttgacggtgtgaggtgctcctncatccacgtcgtgcgtctagtcgtgnctctatacctcttgtctctcgacggcgtgtgtcccacgctccatgatcagcgatgctacgctcgncatgcgatgagatcatggcgcagtacgtatgcagaccgtcgcgcgagtgctgcgcgctgacatcatagag

SEQ ID NO: 12889 - DNA, 395 bp, Glycine max
  misc_feature (81)..(81): n is a, c, g, or t
  Coding DNA Sequence Number=SeqID_3110
tgtctcttcagtatgcggtagccgagatggccaacggtccgtacatcttgcatcacttcaagaaaatggaaggggaatgcngcgtgttctggaacccggagaacgaggagatccattgttcgtgcaaggagtttgagcattcgggaatcttgtgcaggcattctcttcgagttttggccgtgaagaactgcttccatataccggagcagtactttctggtgcggtggagacaggaaagctcccttgttagtgaagagaatcagaatggtatgggtattggcgatgactgtgttcaaacgtttcagtcgcttaccgaaactcttctaacagagtctatggtctcaaaggatcggcttgattacactaaccaagaactttctgcacttatcgatcgt

SEQ ID NO: 12890 - DNA, 467 bp, Glycine max
  Coding DNA Sequence Number=SeqID_3111
gctacaaatagcgaaactggaggtttcatgcttttgcacggagcaaaagaccgttccagtcatccataagcgccattagaagcaccacaggaaatgaaaagacagtcctaagacaagattttgcagccgtcggccacgcgcaagtacgcgacgttgcatagcatgggcgagtgagcaccagatcggcatactgctttcgtacgcctagtaaattgatgatggcggcggcggcggcggcggcacgggcttcaccatcgtcttccagccgttggggtccggcgagggtggcttcacgggcactctctggcccaagcgccggccggctaccacacccagcttcctcctctcacgtggcgtcgactgcgccgaccggctaccctgcgcacccgcgtcggcgtcgccacccagtagcagcactggaggagaacgcagcggcggcggcgagtacgtggccagcagcaccagga

SEQ ID NO: 12891 - DNA, 555 bp, Glycine max
  misc_feature (297)..(297): n is a, c, g, or t
  Coding DNA Sequence Number=SeqID_3112
tgtcgactctctcttcgtgtctttgccgttagctgtctatatagtaataataatttatgctttactacccccccatgcgggaaggggccgtagctagtggacggtgtatggccgaggaccctatctcaccggctatgggttgtatgcgttaggtcccttctggaaaaataatatctataatttatataaatcgaacggggtataagctagtgataaatagaagtaatagcagataattcgagatctagattaatcaaccacccgaggccctcgacgtgggatgcgtgagtcaccacntgattcattgatggatggttcgatgacacacaacggccattgtccagcaccgagaggagatagtgaagtatcgtcgtatttggtcatgttggatgcgacgccggacacgcatatgatcatcctcccttccgggtactctggtgctgcccggcctgctgcggagaaacaacatagtaattatacttcgaattctatcccaagccgcccaccacctgctcgtgttcgcctgtcgctcttctccacatccaggtgcaaaat

SEQ ID NO: 12892 - DNA, 586 bp, Glycine max
  misc_feature (34)..(34): n is a, c, g, or t
  misc_feature (62)..(62): n is a, c, g, or t
  misc_feature (83)..(83): n is a, c, g, or t
  misc_feature (108)..(108): n is a, c, g, or t
  misc_feature (121)..(121): n is a, c, g, or t
  misc_feature (124)..(124): n is a, c, g, or t
  misc_feature (177)..(177): n is a, c, g, or t
  misc_feature (180)..(180): n is a, c, g, or t
  misc_feature (221)..(221): n is a, c, g, or t
  misc_feature (223)..(223): n is a, c, g, or t
  misc_feature (234)..(234): n is a, c, g, or t
  misc_feature (256)..(256): n is a, c, g, or t
  misc_feature (362)..(362): n is a, c, g, or t
  misc_feature (370)..(370): n is a, c, g, or t
  misc_feature (378)..(378): n is a, c, g, or t
  misc_feature (455)..(455): n is a, c, g, or t
  misc_feature (478)..(478): n is a, c, g, or t
  misc_feature (480)..(480): n is a, c, g, or t
  misc_feature (498)..(499): n is a, c, g, or t
  misc_feature (511)..(511): n is a, c, g, or t
  Coding DNA Sequence Number=SeqID_3113
aggaggtagatagacgacgacattacgtatacgngagtgaggggagtgcgggcgacggaagnaggaggcctgcagaatgaagngagagactaggagacggatcagagnagtgtgtgtgatnatncggagatatgagtgagttctgatgagccgattgagtgtagagagagagtgagnaantactttggtttagatgtgtaggattcgagacagtctttatntnttaggtccgtnttctttaggtgagactaggtanacagatgtatctatcatgtgatgtagttatatatagaagtaatgatgtagtgagtgagtagatgatgagctgactctcgctgtcacgtatccttcctcttctactnctccctcngcctgtgngagaataactctatataaagttatagatgagagatggcggcgacgcacacatcctcagagggtgtggtgtgtgttangtgtagcctgtgcgggaggcggngnggggcgcggggggggggnnataatacacatnttacacacatacctatttcatccacattctatatatctatgtgggtggaagcactgactagctaaagtaacacac

SEQ ID NO: 12893 - DNA, 600 bp, Glycine max
  Coding DNA Sequence Number=SeqID_3114
tacttattcggctatatcggatcccgtgtattaggtgtagggacgtggagtgtagtttgagcaagagaatacgtgttcgttggcgggcgggctaccaatagccggtccggagcacactacggcgccaagaaatggatattcacgtgtcgtcgcgattcggtgtctttactcaagcaacaccttatcagagagaatatttagtaagtgtgtgatagtgcggagaagggagccatgtatggcgtgaaagtttgtgagtgggtaccagctcggcataaatgaggggcagaccgcggatataggagtggttgcggtgaccgagacgacgcttccaccccgcctttatagcgccccgtcccgccgagagtataggataagcaaccggcgcgctatcctgcgttcctccgttagtaagattaatcaaaatcgcgccgcgccttggacgggttgaggtgacattaatacaataaacccgcgtcgcccggcggtgttacgtctgtgctttccgcctgcgttgagcgattaccgtatatatgttcgcgctggcccgcgccgccgtggggatatggggggaggtcgacgctgcggtagatgtttgaccat

SEQ ID NO: 12894 - DNA, 579 bp, Glycine max
  Coding DNA Sequence Number=SeqID_3115
atctgcctattctaatggtatttgggtcggattatatattatagcgacacgacgatagagaggaagcacttctgttgggcggcgtgctgggcagacttcgtggtgtggagcgatatagtctattatctagtgtgtgggtcatactttaactaaatacccaccgtggagtgtttaagttgattcatgttacgttctatttatcttgctaactcttcttttgtctgtctgcgttttctcacagagattaatgtgtagcgtattgtttgggttttgtcctgtgtaagatattacaaagacggcagcactgcgctcccatggcgccggcgccagggagccgagtgggagtgtactaccgtcataattactcctgcattagttaaacagaaacgcgtataggcggcgctagttcccctgcatgatgttatgtactgacttcttattttttggactaatgttacatacagctccgtgcagtacatgataagggaaatagagtagctttatgtgcttctcttcttgcctccgaggcgaggggggcggggcacctgatatgtcatgacgtctcattctgtcactttt

SEQ ID NO: 12895 - DNA, 409 bp, Glycine max
  Coding DNA Sequence Number=SeqID_3116
agctccgaaggcaccggtgagtcttcaccactgacgccttggcaaatccaactctgtaaaaatctgtgaatgaaacgaaggatcccagtctcctgaatggcgacaccatttttggcgggagttgcagtagctgcgactgcacttgctggtagatatggtatccaagcttggcaagcattcaaggctaggccacctaggcccaaaatcaagaaattctacgaaggcggtttccagcctaccatgaccaaaagagaagctgctctcattcttggcatcagggagaatgttccggcggagaaagtgaaggaagcacacaggaaagtaatggttgcaaaccatccagatgcaggtggtagccatttcttggcctctaagatcaacgaagctaaagacgtcatgctcggcaaaa

SEQ ID NO: 12896 - DNA, 554 bp, Glycine max
  Coding DNA Sequence Number=SeqID_3117
ccttcttttgttctccatggatgaaagcccaagcatctgcgtctcccctaggtttttgcacaatcgcagcagcacctcttaattctcactcgtctgttgctcgatgttatgtgcagcaggccacgcgtcatcatagccgtgtttggaccactccggtgccggcgtcatccattctcggtgagagcccgcgatatttttcaacttgcttcttcaccggacgttgtgccttgctaataatcagtgtatatgtgtggatattgtgaggagaaatctcatgatttggthggagaagacaatgtccaaacacaacgcttgctaagtgttckatgattkgkktgaktycaagaatcttcgtcsttctagtggtttcgagtctgatttagttatggttgtcagcattgcaaccactgctcaggcgaagatgaagctgtggaaggagacttccaggagttccaagactacgrcgagttctaggcgtgggttagcggcaacccccagtcggctgcctgtgaaggccgtgtttatctacgtttcttttccgcactttgatttat

SEQ ID NO: 12897 - DNA, 513 bp, Glycine max
  misc_feature (152)..(152): n is a, c, g, or t
  misc_feature (275)..(275): n is a, c, g, or t
  misc_feature (472)..(472): n is a, c, g, or t
  Coding DNA Sequence Number=SeqID_3118
aagtgtattaatgtggttgtttatagagtgtttgggtgtatgtgggtggaagatgataataattgtatttagaggagtgaagatagatgtaatattagataatgtattgtatgttggttatatgtggatagatttgtgaagtgaggcggatngggatagggtgagtttatagtgcggatggggtgtgttagcggatgaagactgaagatggttaggatatgtgtatgttcagtagaaaattaagataaataataataaagtaaagatagaatttngtgaaaggatagaaatattataagagagaaaagagagagtagaagatacatgtgatgtagtgatgttgttaatatatctattatatatagatgatgatataatagtagtagaagaataagagatataagaaaaagaagagaagagaagaagagaataagaggagatgtacagtgggtagtcttgggtgtgttttgcnggtggtaattttacagtatagatgttatgtggaggatggta

SEQ ID NO: 12898 - DNA, 489 bp, Glycine max
  Coding DNA Sequence Number=SeqID_3119
gaatcacgtggtcattttgaagaattgattgaattattagagaaaggattgggattggaacgtgcacataccggtatctttaccgaattaggtgtattgtatgccaaatacaaaccagaaaacttgatgaagcacattcaaatgtactatcgtcgtagtaacattccaaaattattaaatgcatgtgaaatggctcatttatgggctgaaatgagattcttgtactgtcatcatgatgaatatgataatgcaatcaaattaatgattgaacattcacctgaagcatgggatcatgcaatctttattgataccattactaaagaatctttaatcaatattgaattgtactacaaggccattcaattctacttggatgagcaaccatcacacattactgacttgttaacacacttgacaccaaaattagatcatgaacgtgttgcacgtgaagtgaaaaatcgtgatcgtgacaatctccctctcattaag

SEQ ID NO: 12899 - DNA, 529 bp, Glycine max
  misc_feature (206)..(206): n is a, c, g, or t
  misc_feature (485)..(485): n is a, c, g, or t
  Coding DNA Sequence Number=SeqID_3120
ataggctttgtatccatcagcgttttttttttatgcaatgataacatagtctactgttattctttactgggcttcgggcctacgacttataggcgccgctatacatctccccactgttttacccgagaacgcgacggacgtcgtcgctatgcgtcgatcatccatatttatctgcaacgccgagagccgcatacactctctacctntctctcgcatacccggataagcgttattcgtacgcgtcttccaactgagggctattaatcttcaatctcgtgaatatctgcataatttaaatacttccagcaccgctatagtatcactagtatttcttatcttttctttatcatcgttatatcacattaaatcttagagtagggggaaacacaaataacacctctgagcctctctctactcgccacaaatacattatatattacgcatatgctctctcttttctttgggccaatacaaaacacaagaanaaaaaagaggcttatttcttatagaaatgcgcacctccgtaggg

SEQ ID NO: 12900 - DNA, 211 bp, Glycine max
  misc_feature (98)..(98): n is a, c, g, or t
  Coding DNA Sequence Number=SeqID_3121
cacccttaaagtcgagagctctaacaccattgacaatgttaatgctaagatgcaagacaaagaagatatgccaccagaccaacaaaagcttatctgtncataaaatcaggtaaaagatgacataaccgtagctaatgacaatatgcagaaagaatctaccctgcacttagtactgcgtcttggtaatataattcaaatctgtagcaatacc

SEQ ID NO: 12901 - DNA, 599 bp, Glycine max
  Coding DNA Sequence Number=SeqID_3122
agccaaatggagcacgtttatattctagagtgagcaccataagttttgagaaccctctcactgtcatattagaagcctatttttctcacatcaaaggggtgtatctcacggggttatcaaaatttcctcctctgaaatatgactctaaagcagagtatttgcctctagagcttcagataccaaagaaaggggccacgggggctgttattaaatatggttcaccacaggatcttgtttttcaaggggcaaatttggttattgggatagaccatcttatgcatatgcacggcactagattctttgctgtgggatatggggttgggaattttgatatacacaaggggcgcaagacatacaatctcattgatcctctccttatgaatacaatattagtgtccacgaatggttggggcaccataaggtataggggttttaacccagagcgccacctctcttggggcacggagactgtgtttattgtgacgaatggggaaggagatattgaaatattccctcttcctccagatataccccagtgttgaagaatatttcatagtaaagaaaataccacacggcacggttgtgttaaatcagactct

SEQ ID NO: 12902 - DNA, 505 bp, Glycine max
  misc_feature (141)..(141): n is a, c, g, or t
  misc_feature (159)..(159): n is a, c, g, or t
  misc_feature (176)..(176): n is a, c, g, or t
  misc_feature (187)..(187): n is a, c, g, or t
  misc_feature (206)..(206): n is a, c, g, or t
  misc_feature (367)..(367): n is a, c, g, or t
  Coding DNA Sequence Number=SeqID_3123
aactggtacgtgctgatgaatctgtattcacgcgacggctatgtatagaagcaccgacttattccacacgctctgtgtatagacacaatagattatgtaatagtgtctgtgtgacgcatatactcgttctactactgtaancgctacaggctaagttgngttgatgccatacgtcncgagctgcacnaccacgtaacgatcgcgcnctctaaatcacataaggcggctagatatgctccatctgtagatatatgttcgttgacgtgtgacggcacgtgcgaatgagagtcagcagtggtcaaatctgctatgatactatctgacgcacacaaatgatactcctctcgtctcataggcagatagatancgctctacgctctcgaccgagtagtagagaataaccacgaaactatcaatatctgcgtcgctcacagagctatgcgagagcgactaatcataccacgctcgtcgcatcacgtgacagctatacgtatctctgctaccg

SEQ ID NO: 12903 - DNA, 466 bp, Glycine max
  Coding DNA Sequence Number=SeqID_3124
actgagcgacgacctgcctctcgagctgccaaatctaagagcttgagctttaggaggaaaaggaaaaatggtgagaatcagtgtactcaacgatgcgctcaagagcatgtacaatgcggagaaacgaggcaagaggcaggtcatgatcaggccttcttccaaagtcatcatcaagtttcttatcgtcatgcagaagcacggttacatcggtgagtttgagtatgtggatgaccatcgatccggcaaaatcgttgtggagttaaacggaaggttgaacaagtgtggcgtcatcagcccacgttttgatgttggtgtcaaggagattgaaggttggactgctcgtttgcttccttcccgacaggttggtcgctccgctcggcctacctccgcgggtattatggaccatgaagaagccaggaggaagaatgtcgggggcaaggtcctcggcttcttctattgatatgtt

SEQ ID NO: 12904 - DNA, 512 bp, Glycine max
  misc_feature (134)..(135): n is a, c, g, or t
  Coding DNA Sequence Number=SeqID_3125
cacgcgtccgacgtgagtaaaaaatggaccattagattattttaatttcaaaaatcaacgatttagatatttttttaattttcatttttctttttaactttttgtatttttttcccaaaattaaccctccctcnntgatgctatctgtcctctgcctcttcccaaccctaacaatcaaaccgtgccgccaccgcacctctgtcaaacctgcgccacaaggtggcggcgctgtcgcgcatcactgcgatggtccacctttgccgttaatgggaatactagacgaagaacaagagagggaaggagaacaatctacggtgatgcgttcgcgtttggtggctttggtgggtgtgatagattggttctatgatgcattgcgcgattggtctttgtttcaggcattggaagggaaggtggttttcaggtgtggctcacagcggcgatgaagatgaggttccagtgatgattgaagttgcccggtggttcgtcgttatcctggcgttttcctttggcga

SEQ ID NO: 12905 - DNA, 526 bp, Glycine max
  Coding DNA Sequence Number=SeqID_3126
acttgtttgatatctttgacgcatttagattcactattctttgatatcatatctaatgctttgtctattgtgaattgagaagatttttctgacctaatgtgccaaaagtttgttccttgtctcattgttttgaattttgtcgcattttcatcaaacaagtatactggtttcgtgcacgcttattctttgtttgggtgggggtgggtcttttcgaaacaatcattttgacttgatacttgctacctcttattaagtgtcggttaatttcggatatgttctgttttgaatattattgttgtttgcagatgtggaaatggatgatgagaagcataacaagtctcttaaacctatcgggaggaagttaaagaagaagtttaagttggggatgaagaatcgtcgcagtaagggtttccttcgaggcaagcgtgtctaagttcccaagtttggtgtttactccttgttctgtttaacctctttcatatctagattccctaattgtcttagaaagtgtcttacgtcgtactgt

SEQ ID NO: 12906 - DNA, 582 bp, Glycine max
  misc_feature (46)..(46): n is a, c, g, or t
  misc_feature (77)..(77): n is a, c, g, or t
  misc_feature (175)..(175): n is a, c, g, or t
  misc_feature (225)..(225): n is a, c, g, or t
  misc_feature (291)..(291): n is a, c, g, or t
  misc_feature (306)..(306): n is a, c, g, or t
  misc_feature (318)..(318): n is a, c, g, or t
  misc_feature (322)..(322): n is a, c, g, or t
  misc_feature (406)..(406): n is a, c, g, or t
  misc_feature (459)..(459): n is a, c, g, or t
  misc_feature (520)..(520): n is a, c, g, or t
  Coding DNA Sequence Number=SeqID_3127
ggtagttctctattatagcagatctcttgtgagccatccagacatncttacgagttcgccgagacgaccgatcatancttaacacacacatcaatctccctctctatacgtcaggtcacatcacacctgcgctactatcatgatagtaagcgccccccacgcgcacgcgctaganacactatctcacgctgatctgacttatcctacgacacaaccttacaatancactacatacgcgcactaataaggcgaagtcgacactgtgagacacaacgcgtactacagacagancagtacgcacgctcnagataccgtttnctcntctgctatatccacacgcgactcgacatctatctcagcactatctcgcgctcttctcgcgacgcgcacatatcacctcatcttnctaggtgcactcctaccgacacaccacattcattctcacacgacgcccccatncctacactctcacctactctcttctgtagcgctctaagtcacacacgcactgataagacantaatctctgactacactcgacacgagatactgtacatatgcagacgatctgtcgtacgcgca

SEQ ID NO: 12907 - DNA, 581 bp, Glycine max
  misc_feature (165)..(165): n is a, c, g, or t
  misc_feature (198)..(198): n is a, c, g, or t
  misc_feature (270)..(270): n is a, c, g, or t
  misc_feature (321)..(321): n is a, c, g, or t
  misc_feature (346)..(346): n is a, c, g, or t
  misc_feature (353)..(353): n is a, c, g, or t
  misc_feature (369)..(369): n is a, c, g, or t
  misc_feature (373)..(373): n is a, c, g, or t
  misc_feature (383)..(383): n is a, c, g, or t
  misc_feature (404)..(404): n is a, c, g, or t
  misc_feature (432)..(432): n is a, c, g, or t
  misc_feature (435)..(435): n is a, c, g, or t
  misc_feature (456)..(456): n is a, c, g, or t
  misc_feature (478)..(478): n is a, c, g, or t
  misc_feature (532)..(532): n is a, c, g, or t
  misc_feature (535)..(535): n is a, c, g, or t
  misc_feature (539)..(539): n is a, c, g, or t
  misc_feature (545)..(545): n is a, c, g, or t
  Coding DNA Sequence Number=SeqID_3128
acagacgtcgcgctacgctgtctgcgccctgactctcacatacgctcatccacttacactctcgcactatctgactgccgcgctccccagatgagggcatgtgatcgactgctcacgctcgctgcagctcataactataacgccagtcagcgctcgcagtcagtncagtatgcacatatcgcacgcctatcacgactntcatcgagcacaccatgacgtgttgatcggcgtgccgtatcacgatgctactctatctacatatacgtcaanagtccacatacatactatagcatactacatatatgcactcaaacgaccaancgagctatgaagcagagcgctacangtcgccncgcgatctctgctcancaantcgcattacncatgcgccattacatacacgnccatgcgtgtgtgttccgtatatgccgngancagtgactggtgacagctctncctactaccgttcacatatganctctgatctgcgagcgtgcgcgcgatgcagctatgatagctaatgactctactngcngccntggctngtactattgtctaccttgtctacgacatgcacgcgt

SEQ ID NO: 12908 - DNA, 367 bp, Glycine max
  Coding DNA Sequence Number=SeqID_3129
gtgttgctgttcacccctccggtacgccgggtcatagcattcctagctgcctgtgttaggtacgtgcccttaacgggataatgcctttctctgtcgtaggtagcattcaaaatcctggatcaatcagcaatgttgcagcctggaaacgtaagcctatatttaaatccatcagctcactcaatgatccatcgaagataggtgctgcaaggtatacaggcagattgtctccagcaccatgctacatccaattctcgaaactagtgccctgcatgttatcctggtagctacatgtaagttcaccctcgtttcagaactttggatcaccttttattattccttttttgcgctctacgcctgccctataggt

SEQ ID NO: 12909 - DNA, 280 bp, Glycine max
  Coding DNA Sequence Number=SeqID_3130
atttcctgctaaagttggcctccctggctgaccaaatttatactcccgaaaacaaaggggtttcatgcttccttggaagctctccaggcctcattggatccagtatacgatgtgccaattgcaaccaagaaccagtgtccttcctttctggacaatgtttttggtgttgacccttcaaaagtgcccctgcatgtgcggcgtattccggtgaagaaaattccagcttctgaaaccaaagctgcttcttggttaatctacccattccagatcaaggcccaat

SEQ ID NO: 12910 - DNA, 505 bp, Glycine max
  misc_feature (116)..(116): n is a, c, g, or t
  misc_feature (142)..(142): n is a, c, g, or t
  misc_feature (151)..(151): n is a, c, g, or t
  misc_feature (208)..(208): n is a, c, g, or t
  misc_feature (293)..(293): n is a, c, g, or t
  misc_feature (317)..(317): n is a, c, g, or t
  misc_feature (362)..(363): n is a, c, g, or t
  misc_feature (376)..(376): n is a, c, g, or t
  misc_feature (419)..(419): n is a, c, g, or t
  misc_feature (449)..(449): n is a, c, g, or t
  misc_feature (471)..(471): n is a, c, g, or t
  misc_feature (479)..(479): n is a, c, g, or t
  Coding DNA Sequence Number=SeqID_3131
gttgctgttgttcgtagcgcgcacagttattctacctccgtgcttttcgtctctcttcttgtctctctctactccatccgcgggccacgtgcgcggctctcataagcattcatcancacactctgaatgcaacgatcatacnttcacatancagtaatatctgagatcgtatacttaaataactcccactctatcttcgatctcgtcntccgttctctcagctcacaatatcacaaataactactctgcatgctcaatgtctcatacacactacctcatctcgcacatcgctncaccaatccagataatctagacanacacagcttatcgcaacagatatgatagatcattcacacaacacnnacaccccccagcnccacgcgtagcactctcaagacgtcatgctatgcatcattagntagcatcgccagactaccgactgctgcagnccactccctccacatctcacgncagagtancgcatttcgtatgctcgcttttataa

SEQ ID NO: 12911 - DNA, 489 bp, Glycine max
  misc_feature (108)..(108): n is a, c, g, or t
  misc_feature (445)..(445): n is a, c, g, or t
  misc_feature (464)..(464): n is a, c, g, or t
  Coding DNA Sequence Number=SeqID_3132
gatttagtatatccgcacacctacctttatttctatttttcttctactaatatgtcttcattagttatattattcatctataaatgtattcttcttacatttcgatcnttacatgtcgctaacgtatttatacatttatattatttcttatctttatcttattcttatcactagtatgactcctcttctaataccattatatatttatatgattcatattcatcctacatattaataaattattgttatctacaatatactttcgacatcacatttctatctaagatagttaattgcatttattataatctcttctcccacatcccatgcatatatttttgtttagtcgtatgatctgttcatctccgttaccaccattctatccttttttattctcttatttatctgtatatcatatttatttattcattaattgtcctttccncccacccatcctagcgagngagagacaataccacaatattatta

SEQ ID NO: 12912 - DNA, 171 bp, Glycine max
  Coding DNA Sequence Number=SeqID_3133
cttattagaagagagtaccaggcttatcagctgagtggagaattctagggatgaagatggccatagtaaaaaagcaatggagagcttaggttttgcattacatgtagtatatgcagaagttacagaagccaaagagaatctgcagcgcatcccccctggaagtgaaagata

SEQ ID NO: 12913 - DNA, 378 bp, Glycine max
  Coding DNA Sequence Number=SeqID_3134
ggtgacggtgcctctggaccgttcagcaacaccaccggagtttcttattttgccgcctcctacaataaattccgggaggcccgtggtgctcgagttattccccttatctaccatgagtcacctgagaaccttaacaagaagctcgatttgtacaatggagtgctcttcactggggggggagctgcttctggtccatatttggaaactcttggaaacatttttaacatagctttatataacaatgatgctggagaccatttcccaccaattgccttcaacttaggagcaaacctcgtaataatgatcgaaagcgagcaaactgctattcctgaaccctttactgcgtcgaggttgcctagctctcttatattgtgaaaa

SEQ ID NO: 12914 - DNA, 442 bp, Glycine max
  Coding DNA Sequence Number=SeqID_3135
gctcaaaccgcctatggagcgggcaagagacgatcaccgctaacaggacggtaaggagcaatcataattgcgtttcattaggcatagcccgtatttctgttataggcttatcgagcgagagactcttgttctgatgtgttcatcgtactaattcatctgtgttgtacaattaaggtcagaaaggagaacgttagagatcggctgcttttataatatttaggttgtggttgtgtctactactagatagcttaacaacagatatttggtattaacctgcacacgctactcatacgcctctcctgtctctctctctaaatatacgaagctggcgacgtcgagataaagatatagagaaaaaccgtggttaagagcatcgggagcctcgctataacaatagagaaagaggcgaaggatagggacacagtttcgtgagtatcgactt

SEQ ID NO: 12915 - DNA, 588 bp, Glycine max
  misc_feature (67)..(67): n is a, c, g, or t
  misc_feature (69)..(69): n is a, c, g, or t
  misc_feature (89)..(89): n is a, c, g, or t
  misc_feature (138)..(138): n is a, c, g, or t
  misc_feature (141)..(141): n is a, c, g, or t
  misc_feature (192)..(192): n is a, c, g, or t
  misc_feature (225)..(225): n is a, c, g, or t
  misc_feature (245)..(245): n is a, c, g, or t
  misc_feature (357)..(357): n is a, c, g, or t
  misc_feature (373)..(373): n is a, c, g, or t
  misc_feature (378)..(378): n is a, c, g, or t
  misc_feature (388)..(388): n is a, c, g, or t
  misc_feature (405)..(405): n is a, c, g, or t
  misc_feature (503)..(503): n is a, c, g, or t
  misc_feature (520)..(520): n is a, c, g, or t
  misc_feature (541)..(542): n is a, c, g, or t
  misc_feature (547)..(547): n is a, c, g, or t
  Coding DNA Sequence Number=SeqID_3136
aacatgcgacggataggtactacatgactactgatctctcatctacttagtctactcattcggtatntnactagtcggcgctcatagancgctcgacgagtgcgcgtgcgtgacgcagacgctaaatatagagtgcantantctgtatagaagtacagatatacgcgtagcgtagtacacgatcctccgtanctagcggctgctcagagacgcgactatatgtcncctccatgcgcgctacgcgncgttgtgtgcttgatgctgcgcgccgctatgtgcatgtctctgtctgagtgaggcaccccgagctcgcccacgtcatgttatctgagagtcataatacatcgttatatctgncacatgcgcgactcantggancatgacaatngtcgatgtgatgagcanctcgctgccagtacagtgacgactcgaacggttcctgctcattccgatctcgtcatgactatgattatgctactatatcacgagacgtatgatctctncactcgatgactctctnatatgatacgtgtagaacgcnntcggncttggagcgtactccgttcccgactacacgcatctatgtgg

SEQ ID NO: 12916 - DNA, 508 bp, Glycine max
  misc_feature (36)..(36): n is a, c, g, or t
  misc_feature (144)..(144): n is a, c, g, or t
  misc_feature (316)..(316): n is a, c, g, or t
  misc_feature (439)..(439): n is a, c, g, or t
  Coding DNA Sequence Number=SeqID_3137
tactacgcacacgacggatagacgcaggggagcggnaagaaacggagcgaacggaggcacgccgatagcacctggtcgttagtgataacagtctgaatattaatacaacacccacatcttattctcaatttctatcactcatcnaaactactggtcacgacccgcacaaactacaaaaagtaaaaaacacaaaagaatatcacaaacaatatgtgtgcgcagagatatggttgagcacagtgagggagaggggaactaaaacgaccacaccacaccacagcacgcgactccgtactgggtaaagcggaggagacgnacacacttatgtcatgacagagatacttatagaagcaatattcaatcagacaagcggacacagttggcgcgcgtcattagtcgtataatagttggtttgattcttcctaatagccggccggtnggaggggtcggcaggcccgtcgtgcccgcgcggggtggtgactataaatcaccttacgtgttcgcgact

SEQ ID NO: 12917 - DNA, 391 bp, Glycine max
  Coding DNA Sequence Number=SeqID_3138
ggagacaacatttcaagcacgacctaaaaaacatgatctcgtctttaacccacatgggagcagagaagggaggaccgagccaatatgaagaaagggaggaggatgaaggcgtcagagttatcacgctctctggatccaacataggagccaccatgaagacagagctcgacaacaatcatggagaagacaaacatgagcttgatttccttactaccttcgttaacagcaactttcaagctgtgaacaactcgctaatgatgggggccaagtacgagactcatgatcccggcgttcatcttgacatctcgggcgatgtggagaagcctttgatgaaggcatctgcgagggagacaaaggataagaaggggaagactcctgctcgaagttgaac

SEQ ID NO: 12918 - DNA, 435 bp, Glycine max
  Coding DNA Sequence Number=SeqID_3139
gactgcattctattgatcgctaccaatcaatgtttctgatcgattgcaccaagtgcttcgatgtgcccttggatcacatgactttgtctataggagacattgccccctctggcatggtattgcaggatgtcacctcagatggttgcacatacagcttcacataaacacctttgtctacccctttacatccctttctctcgatgcttatggtactttgcatgcaatttgccttctcacaggagaactcatcataccatcgctctataaccttgctagtgctctcttccgtggactttttctgcatctaccagcaactagtgtgctccagctgctgtggagtggtgtgaccattgaagcttggtggcgtcatgaccatctcaggatgattgaaacagcatcagcccatctatttgctgcgatccaacgattcctgaa

SEQ ID NO: 12919 - DNA, 557 bp, Glycine max
  misc_feature (78)..(78): n is a, c, g, or t
  misc_feature (316)..(316): n is a, c, g, or t
  misc_feature (326)..(326): n is a, c, g, or t
  misc_feature (360)..(360): n is a, c, g, or t
  misc_feature (390)..(390): n is a, c, g, or t
  misc_feature (465)..(465): n is a, c, g, or t
  Coding DNA Sequence Number=SeqID_3140
cgccttgagctattgcttcatggatagaccaccgcacgcccctgcctcctcctccgtgatatctcgcatgctcgaggncaacgcccgccgctcaccgatgctctatgccggcgtataccgcacacacaactctctcattatccgtcgcgtcatctacgtgcacacaccacgtcgtcgctgtcctctgtccgtgccatgtcttgtcgcacatctgctgcctctgtctgagctactaaccacatcacgaccggtctaactctcacacctacacatcgatactcataacataagacgccggctgacagtgtggcggcgnaacaacctgngcgcgcttccactctcgacacaccccgatctacnatttgaacgcttgtggcatatactcacacntcggctgaccgcaccatacacaaccacgacgatcgacgacgcatacgtacacacttcgctcgcgcgcccgggcgntgttggtctctgcccgacagctcacacccttgaagaggcggggtgtgtcgtccgctgcccctcacgcaggacatcgttcatctgctgatcgc

SEQ ID NO: 12920 - DNA, 513 bp, Glycine max
  misc_feature (48)..(48): n is a, c, g, or t
  misc_feature (150)..(150): n is a, c, g, or t
  misc_feature (153)..(154): n is a, c, g, or t
  misc_feature (160)..(161): n is a, c, g, or t
  misc_feature (184)..(184): n is a, c, g, or t
  misc_feature (187)..(187): n is a, c, g, or t
  misc_feature (248)..(248): n is a, c, g, or t
  misc_feature (279)..(279): n is a, c, g, or t
  misc_feature (284)..(284): n is a, c, g, or t
  misc_feature (311)..(311): n is a, c, g, or t
  misc_feature (314)..(316): n is a, c, g, or t
  misc_feature (319)..(319): n is a, c, g, or t
  misc_feature (342)..(342): n is a, c, g, or t
  misc_feature (369)..(369): n is a, c, g, or t
  misc_feature (383)..(383): n is a, c, g, or t
  misc_feature (422)..(423): n is a, c, g, or t
  misc_feature (443)..(443): n is a, c, g, or t
  misc_feature (447)..(447): n is a, c, g, or t
  misc_feature (452)..(454): n is a, c, g, or t
  misc_feature (457)..(459): n is a, c, g, or t
  misc_feature (471)..(473): n is a, c, g, or t
  Coding DNA Sequence Number=SeqID_3141
ttattttctctcctacttgttctctctctacatcctcctctcagatanatagatataagatacatgatcactatgcgcttcatgcagaaccatcagtgcaaatacactccgatactctgccaaggaaggacaactacatacaaacctacnggnnttcaanntcaagagctctgttgtacagagnggnggaggctctccatccagcgctaactctctatcgttagtaagaaatatatatacctactatntagagcttctctcacatagactatatcttcncgcanctcgatacactgcgccgtcaacaccgntgnnntgnctgtaggcaacactctccgtgtnaggggtaactatatgttgactataagnatctatgaatttantaagaggtatgtgtggggggagaggagaggacactctannccaagtcatgtatctctcgnaagngagannntannntatatttgtcgnnnggaggtgtgtattattatagtactgctcgtttacatcctc

SEQ ID NO: 12921 - DNA, 144 bp, Glycine max
  Coding DNA Sequence Number=SeqID_3142
ccccggttaattacagactctccatcgttgaaagaccatctcagcttcttcgacatccgcttgcttcgttacacttctcacttgagatccatcgatcattgatcaataccattccaatcaacacttcacaacatcaacaaacaa

SEQ ID NO: 12922 - DNA, 497 bp, Glycine max
  misc_feature (124)..(124): n is a, c, g, or t
  misc_feature (168)..(168): n is a, c, g, or t
  misc_feature (175)..(175): n is a, c, g, or t
  misc_feature (181)..(181): n is a, c, g, or t
  misc_feature (209)..(209): n is a, c, g, or t
  misc_feature (242)..(242): n is a, c, g, or t
  misc_feature (262)..(262): n is a, c, g, or t
  misc_feature (277)..(277): n is a, c, g, or t
  misc_feature (393)..(393): n is a, c, g, or t
  Coding DNA Sequence Number=SeqID_3143
gcagcgcaatacatcctaatctgtatgcttctagttgtgtattgcctatatctaacgagacgtgtatactgttattccgcgctcagtcgtataattatatgcatacatatcctctcatgtctgnccgcgtacagtgacccatattatgataataactgacgcgatcgngactacntatacnactcagatcgttgtatgtcgtatcccgncgtgcgagcttactagcgtctgtcacgatgagntagtatatacatatttcgtncgcgtagggcgtgtngctatcttcagacgacacgacgctggcgaggataccacagatatatacgtgctgatgtgactatatgatcgtctatgtgcgcgtcgtctgttataacagcgcactcgcgcgtattnatctcttccgtcatgtaatacagctgtacggcgtcacgtgcgtgttatctttagacatgatcgcgcgtatattcttgtctatgatatcaccgtgtggctgcgtg

SEQ ID NO: 12923 - DNA, 553 bp, Glycine max
  misc_feature (68)..(69): n is a, c, g, or t
  misc_feature (130)..(130): n is a, c, g, or t
  misc_feature (146)..(146): n is a, c, g, or t
  misc_feature (158)..(158): n is a, c, g, or t
  misc_feature (185)..(185): n is a, c, g, or t
  misc_feature (302)..(302): n is a, c, g, or t
  misc_feature (322)..(322): n is a, c, g, or t
  misc_feature (420)..(420): n is a, c, g, or t
  misc_feature (504)..(508): n is a, c, g, or t
  misc_feature (510)..(513): n is a, c, g, or t
  misc_feature (515)..(516): n is a, c, g, or t
  misc_feature (519)..(519): n is a, c, g, or t
  Coding DNA Sequence Number=SeqID_3144
agacgctgcaacgaatacacaacagtcgcgaacacgacgcggtacacgcgcagtcgcggggttatttnntggaagcgcacgcggcgcggcgccacgccgcgcagcgagcgaaacagcaagaaagagcgancgtgggcacgtgacancatggaacacgnagcggcgagcgagggcgcagggcgganagaaggctagtgggagacactccacccgctcggggcggcgaggagggcgagcgcgacacagagggaacgcgataccgacgcacacacaccagcgcgaccacaaaaagacgacagatnaggcgcgcacgcgacgccgnccaggcacgagcgcgcgagcggcgctaccggacgggtgaggcgcagaagggagggcgaagaggagcaagtgtgagagaggacccgacgcgggaggctnccggatgggcgggcaagcagcagcggggtggcgcaacaaaatggagagggggaggagagagagaggaggaggcacgagcaacannnnntnnnnannaanccgcgcggcgaccatcggagtctcagatgtgata

SEQ ID NO: 12924 - DNA, 452 bp, Glycine max
  Coding DNA Sequence Number=SeqID_3145
cattccaaaattcctacgaccgagtgagatccgactggtaactcagctaccatcagtttgctctccctttagcttgctcgtcctcgactgaggcacctcccagctcgactcgcatgtgatgtgggcttggatcttgtcttccgctgccagcttgaatccatcttcagcatgaggatggcggcagcgttgtcttcccctagcgcgcgagccagacgcatcgtcgtcgttcccagtcgaggcagccagacacatcgtcgtcttcctccacatcggcagctttcttcgtcctacaggtcaagtgggaaccttaacatgttgactcttctgcaaggatagggggatgtggaacctcgagtgtgctccctatagaagcagcgctgcaatatgagatgacaccactgctagtactatctttccttcggaacacaactttgctgtgattgcctccgtag

SEQ ID NO: 12925 - DNA, 595 bp, Glycine max
  Coding DNA Sequence Number=SeqID_3146
catcgagtttgacggtgcttccagaggaaaccctggaagagctggtgcaggagccgttctccgtgctccagataacactgtgctcttccgttctcgcgagggtttaggctctgctacaaacaacgtagctgagtatcgagctctcaatcttggcctcgagacggctcttaacaacggctttagaaatgtgcgcgtccagggtgattcacagcttgtctgtaagcaggttcaaggtgaatggagaacccaccacccgaaaatggctgagctttgtggacaagcacaggggctgatgagtcaatttgactcatgtgatattcaacacgttcctagggaattcaattcagaggctgatgctcaagctagccgtgcgaccaatytggcacagggtgaaagtcaatacgataatgcaggccgcggctatggaagaaggggatactaatatccaagtggagtaatatgcttattcctgttttcttgttttcttgttttaggaatcatgtcttttagcatgttatgtgttaacatgatgatgaacatgctcttctctctctctcttttgctttgtctcacggcatgttgactttcccaagaa

SEQ ID NO: 12926 - DNA, 550 bp, Glycine max
  misc_feature (34)..(34): n is a, c, g, or t
  misc_feature (36)..(36): n is a, c, g, or t
  misc_feature (346)..(346): n is a, c, g, or t
  misc_feature (391)..(391): n is a, c, g, or t
  misc_feature (430)..(430): n is a, c, g, or t
  misc_feature (432)..(432): n is a, c, g, or t
  misc_feature (472)..(472): n is a, c, g, or t
  misc_feature (477)..(477): n is a, c, g, or t
  misc_feature (514)..(514): n is a, c, g, or t
  misc_feature (522)..(522): n is a, c, g, or t
  misc_feature (525)..(525): n is a, c, g, or t
  Coding DNA Sequence Number=SeqID_3147
tctctgctatatctcagtcgctagagagccacancnacccaccgacacacgcggctactataacactaaacatacatgcacccttgctaagtttgagtgggacatatcccacacacatacgctcgcacacacgacgtaaataggtgttgggtatgtcggtctctctcttctctgtttgttgttgacgtatgcgtgtacttgaatgcggcgcgctctcgcgcaccgaacagcccacgagacacgaacaccaatatgcacatatctcaggtactctgttgactcgatgattgtctcgcggctcatactcattgagagcatcagacccactcatgttgatgcgatatanttatatagacagaggtaagtattataataatagttattgcatgtnttgtgttgtctggatgtcgtagtgtgcatcgtactgctngnctgcggtgctggcgtatagacctctccgtcagcagagacnatacncacgtgcagggccgcgcgccgagataggaatagagancacacacnagnagactctatgcattcatctcacgcg

SEQ ID NO: 12927 - DNA, 534 bp, Glycine max
  misc_feature (473)..(473): n is a, c, g, or t
  misc_feature (487)..(487): n is a, c, g, or t
  Coding DNA Sequence Number=SeqID_3148
agtttatacagatttcaagccttaaagtgatcatgagatgagtagagtcgagcgtcaacgtgcaatgtgaggcgctaggagtggatgttacagccacacgaagaggttgggcagatcggtccggggtcgtgggcgagaacctcggcagtaatagtgaggtggatgaggcggatctatgcgccagatataagaatgctatattgattatttcaggcgcgaaagtgtgaagcagcggaaaatttggtagatctatgggctgggtagttaatattgtgaagagatatattctatcctgttttctatatgcgtcctaaaattcatttacccttgctccatgcatagatagttgttatagttataaatcatagaatatatacagaagagagattggtccgtagttctcccccactctgtagcctcctgggggggtagtaatcattcgtgtgagtatctttgatgagtcgccgcgcgcncgccgacatggcgngggtggtgggtttttccatggttagtagtagccgtgatgcgtggcaa

SEQ ID NO: 12928 - DNA, 522 bp, Glycine max
  misc_feature (97)..(97): n is a, c, g, or t
  misc_feature (181)..(181): n is a, c, g, or t
  misc_feature (211)..(211): n is a, c, g, or t
  misc_feature (385)..(385): n is a, c, g, or t
  misc_feature (467)..(467): n is a, c, g, or t
  Coding DNA Sequence Number=SeqID_3149
gttagtaaatctctcaaagcgacgcatctctagacatacagatctctcctctttgtacatgttcactcctctctcttctgtattaataatgtgctanattggtgaatagcacgatagcgttcatctctatctatctctcgtacataacgacacatattcacctatgtcgttatcgtgcgcntagtctcttcctatcttatatatatataanaatataatacataaagaaaagatatcacaccatatatgtatgtaactcattacataacacataaggctatacgttataagacatagacacactcatattatataggttactacatcgactagcaggcataatactcatacgctatacaatctcctctactagtcgatagtgtangtaccatgtactgacaggtgtgtactatcgaccctccacgatcatctattattagaggctagcacacagaatgtcatgtcantgatgcataaacgctattcgtcatgcaccaactatacacaacagatatcccgctc

SEQ ID NO: 12929 - DNA, 513 bp, Glycine max
  Coding DNA Sequence Number=SeqID_3150
tatttcttctcttctgccaagatgttttcttcattcagggttgccatccatggcagatgctcatgtatcttctcatttttcatatccgtgggtgtaagttacggttttacaaacagtgagcttattactctcattattattgtttgttgcattctgtgttaactaaaaaaatctagccatgttaatctgcacattgccttagttttttaactcaaggtttttcatataaaggagaacttcctagagttgctgctgttagagaatggtgggaatagtctgttgtctcatctgctgaaatcttagtttatccagacgagttgagagtatctatatgattgttcaatatgaagctcgctgaagacaaggaacaaacatcattcactgttaagtgtgtgccctgagacaaagctactacaatggagaaatgtattaggcagtactcgctcataggtagtaatctttccattggactttggcttgaagtggtaaaaacttgtcaaacctgtattgaga

SEQ ID NO: 12930 - DNA, 330 bp, Glycine max
  misc_feature (31)..(32): n is a, c, g, or t
  Coding DNA Sequence Number=SeqID_3151
acctgatcctcttagcggccgagagcgttcnnttttttttttttttttttttaatttttaaaaacgtttatatataatcacgattttaaaccacagaatatgaaaataattgcattacatgttaccagctgggtatagaaatttgagcagggagccatgacaaattagagaatgggaatattgaatcacaggataatattggccacattcattaaagcaaccaaaaaaattaaactacatgcacagtactcttaatagatgccagaacgaccagacaccagctaaaaccttaggcaaatcgaaataccttcaactatttagcaataccat

SEQ ID NO: 12931 - DNA, 264 bp, Glycine max
  Coding DNA Sequence Number=SeqID_3152
tccactccgagatcatcgacgtgcacatcctcacacgactcgacggagccacgatgacatccgccacatgcgtatcgtacctcatgcaccgtcctctgcacactagacgatctctggcgctgattcagcaccgacacgtggccctcgctcctagaacccatcggtcgccaggtaattgtcggcatccccgagagaatacggtttcattgttttcggaggcgatcccgttcctgcaaaaattctcccttctggaggaaagggccg

SEQ ID NO: 12932 - DNA, 468 bp, Glycine max
  Coding DNA Sequence Number=SeqID_3153
tgtactctgaaaaatgcaaacgccagatgtaacgatacctaaagttgcacctaaaccgccgaggaaagtgaagcttcctacccccagagagctgaaatcacactatgactctaagggtatgcacacgcaagatgcgtcgatcacggacattgaggatcctctgaaagctctgattaaaggcatatcctcctggaaaggtatacacgactaggtatatgtactgtatccttctaggacaattgttgggaattatcccctaaactcccctgaatcttgacatcgaaggattggattccaaaggcctgctcacaggttgagacccttttagaaattggagtttagccacccgtggcctggcccctccaaagagaaattgggaggaaccccgccgcctccagattaattggccccctctttggtgcaaaaaatgagaactaatggaatacttctggcagttaaaatcgttcc

SEQ ID NO: 12933 - DNA, 155 bp, Glycine max
  misc_feature (102)..(106): n is a, c, g, or t
  Coding DNA Sequence Number=SeqID_3154
ctgcagacaaattgagtgggattgtgagttcttggaggctgaaggaattatggattacagtcttttagttggccttcatttccgtgatgatgatacatatgnnnnngatgggattgtcaccatttcttttccgcaccggaatgtgggattcttat

SEQ ID NO: 12934 - DNA, 515 bp, Glycine max
  misc_feature (73)..(73): n is a, c, g, or t
  misc_feature (381)..(381): n is a, c, g, or t
  misc_feature (472)..(472): n is a, c, g, or t
  Coding DNA Sequence Number=SeqID_3155
atgagcggcactgctctgagagtctctctcattaagatatcacctaaccgctctagagagactcgctcacagngtcagtcgatgatctattcgtgttgctggactcacgagggggagcaccggccgtctgagtaacaaagtagatataacgaagatggacggatgaaatgtacatgatcatatcatcatgcacgatcacgcagagatagatcctgtataagacgagcaatgacaatacgagatgaagatatagtatcgtgaatgtgctcgagctgttgtatgtgcagcgctcgagcgcgcgctggtcgccgcgtacacatcgcgccctctcagcgctgcgctgacacgagatgtacagagcgtagctcgaatattaacganggagcgagagcacatagcctattgtatacacgctatcatataccagtataaaatcatatgtacgatagcatatagatgagctacataatancagcatactcatcactccatccgcctttcgagaggcgcgagag

SEQ ID NO: 12935 - DNA, 476 bp, Glycine max
  misc_feature (66)..(66): n is a, c, g, or t
  misc_feature (148)..(148): n is a, c, g, or t
  misc_feature (157)..(157): n is a, c, g, or t
  misc_feature (182)..(182): n is a, c, g, or t
  misc_feature (215)..(215): n is a, c, g, or t
  misc_feature (226)..(226): n is a, c, g, or t
  misc_feature (233)..(233): n is a, c, g, or t
  misc_feature (243)..(243): n is a, c, g, or t
  misc_feature (268)..(268): n is a, c, g, or t
  misc_feature (306)..(306): n is a, c, g, or t
  misc_feature (309)..(309): n is a, c, g, or t
  misc_feature (338)..(339): n is a, c, g, or t
  misc_feature (341)..(341): n is a, c, g, or t
  misc_feature (348)..(348): n is a, c, g, or t
  misc_feature (355)..(355): n is a, c, g, or t
  misc_feature (361)..(361): n is a, c, g, or t
  misc_feature (363)..(363): n is a, c, g, or t
  misc_feature (366)..(366): n is a, c, g, or t
  misc_feature (371)..(371): n is a, c, g, or t
  misc_feature (376)..(377): n is a, c, g, or t
  misc_feature (382)..(382): n is a, c, g, or t
  misc_feature (414)..(414): n is a, c, g, or t
  misc_feature (419)..(423): n is a, c, g, or t
  misc_feature (427)..(430): n is a, c, g, or t
  misc_feature (432)..(434): n is a, c, g, or t
  misc_feature (437)..(437): n is a, c, g, or t
  misc_feature (442)..(445): n is a, c, g, or t
  misc_feature (447)..(447): n is a, c, g, or t
  Coding DNA Sequence Number=SeqID_3156
atatacagcgccgttacttacaagtagcgtcatagtcgttcgatgacgtgtgcggcaccgcgcgtncgtgattatactacgtcgtatcagatcgcgtctgcttcaggtcgtcgacgagtaggtaggacgtgtgatgagtgaggcaganatatagatntacgacgtgcgcgcagcgggtgagnagcatgatggagtgcgtgatcaaagagcatagncgtcgcgtagnagcgtgntgcgatatgntgagctgtttgcagccgtgtgatcntgtgacagcagacccatcgctgcgcggtcgtcgcgttncgntgggagacacaaaaaaggccggcccgccnncnctcgtcntctttcntctctncnctnctctnttctnnctctncgatgtagtgaaggtacgctgcttcgcgcctnccccnnnnncgcnnnngnnngcngcgannnntngcgtctgtgtccctagctactagtactag

SEQ ID NO: 12936 - DNA, 181 bp, Glycine max
  Coding DNA Sequence Number=SeqID_3157
tcaaccttttcaggtctccttttcgcgtctcggtcgcgaatcgaacgccctacgaaggtcggatcccggagggctcctcggaaagaaacccctccacaagccgccaagggaaaaatccgatctctcggggaatttcaaacgctccctccggggaggagaatcccgattcccgatcccaatt

SEQ ID NO: 12937 - DNA, 563 bp, Glycine max
  misc_feature (26)..(26): n is a, c, g, or t
  misc_feature (54)..(54): n is a, c, g, or t
  misc_feature (74)..(74): n is a, c, g, or t
  misc_feature (95)..(95): n is a, c, g, or t
  misc_feature (106)..(106): n is a, c, g, or t
  misc_feature (133)..(133): n is a, c, g, or t
  misc_feature (135)..(135): n is a, c, g, or t
  misc_feature (160)..(160): n is a, c, g, or t
  misc_feature (169)..(169): n is a, c, g, or t
  misc_feature (178)..(178): n is a, c, g, or t
  misc_feature (229)..(229): n is a, c, g, or t
  misc_feature (233)..(233): n is a, c, g, or t
  misc_feature (241)..(241): n is a, c, g, or t
  misc_feature (319)..(319): n is a, c, g, or t
  misc_feature (323)..(323): n is a, c, g, or t
  misc_feature (325)..(325): n is a, c, g, or t
  misc_feature (327)..(327): n is a, c, g, or t
  misc_feature (350)..(350): n is a, c, g, or t
  misc_feature (355)..(355): n is a, c, g, or t
  misc_feature (381)..(381): n is a, c, g, or t
  misc_feature (387)..(387): n is a, c, g, or t
  misc_feature (407)..(407): n is a, c, g, or t
  misc_feature (432)..(432): n is a, c, g, or t
  misc_feature (437)..(437): n is a, c, g, or t
  misc_feature (447)..(447): n is a, c, g, or t
  misc_feature (537)..(537): n is a, c, g, or t
  Coding DNA Sequence Number=SeqID_3158
tgacgcgcgagacgcatcacacacanccacgtatgcacgacacgcgtcaacacncgacacaccgcgttgatcgngatcgctgacgagtcgactgnacgtctagcgncatagctcgatgcgactgatctgcatnantgcgcagatgatgacgtatgctagncaacggagnatatgtcgngagtcagacgcgcggtcgcgcggcacacgagcgcatctgcgtatgactggntgcnctgaacgncgcactatgatatgatcggccgagcgatacgtatagcgtgcgcgactgtgtcgtacactacacgatcgcgcgtgacgnccanangnatgtagaaacgagcgagtcatanatatntatatcgatagtatatacagtatgcnatagantgcgagcgcgaggtgacgancacgcagtacgacaactacgactcngacgnacatgcgagngtggatgcgataatcgtcgtgatcatatacgaataaaaacgatcgaaagtcggcgcgatgcgactctatcgtaggagcgacgatatgaancgagtagatgcttgcgcgtgctctga

SEQ ID NO: 12938 - DNA, 492 bp, Glycine max
  Coding DNA Sequence Number=SeqID_3159
tatattcgtccttttcccagtaccagagtcctgtgtagatgccgatgatacctggttaccaaatatatgctcaacttatcctatcaataataaatcgttttgcagtgtctatcatgctagccatgtcaggattatacatgaatgagctttatcccactccagtgagagcgcttggaccagctgtgactatctttatagggagacttggatcatttacagcaactattgctatagctatgtgcttagaatatgagataagcccaattttgttgtttgcaatagtgtctttcccagcaatacttgtttctatgatcatgaaggagaccaggggattgcctttgccagaatttattgaagaggaagatcctaatcatcctaatcatcagcgtacttcaaagaaaacaaggacaaaagcaaaaagcttgtatttaacatttaactaatggcaatacaagcaaaataggagaataggacatagctgacttgagtgca

SEQ ID NO: 12939 - DNA, 506 bp, Glycine max
  misc_feature (55)..(55): n is a, c, g, or t
  misc_feature (140)..(140): n is a, c, g, or t
  misc_feature (153)..(153): n is a, c, g, or t
  misc_feature (207)..(207): n is a, c, g, or t
  misc_feature (209)..(209): n is a, c, g, or t
  misc_feature (268)..(268): n is a, c, g, or t
  misc_feature (361)..(361): n is a, c, g, or t
  misc_feature (363)..(363): n is a, c, g, or t
  misc_feature (366)..(366): n is a, c, g, or t
  misc_feature (368)..(369): n is a, c, g, or t
  misc_feature (372)..(372): n is a, c, g, or t
  misc_feature (374)..(374): n is a, c, g, or t
  misc_feature (389)..(389): n is a, c, g, or t
  misc_feature (415)..(418): n is a, c, g, or t
  misc_feature (429)..(429): n is a, c, g, or t
  misc_feature (431)..(431): n is a, c, g, or t
  misc_feature (440)..(440): n is a, c, g, or t
  misc_feature (442)..(442): n is a, c, g, or t
  misc_feature (448)..(454): n is a, c, g, or t
  misc_feature (456)..(456): n is a, c, g, or t
  misc_feature (473)..(473): n is a, c, g, or t
  Coding DNA Sequence Number=SeqID_3160
gtacttatatagagattgtcgtatttgtgctatcgtcttgattatcttatattgngttattatttatatacatgtcatacctctacttcatcatctatccctcttgtctagcactctcacacacacacacaaaaaacaanacaccatcatccnccacacgacgtcgtcagagagggagagcctgtgcgacgtgcgtgcgtgcgttgngngatctattgtggtgtcgtgtcggggtggcgtgtgcagacatcacaagtcatgcgaggtncgatctgtgtggatagctaccggtccgggcatagtatcgcgtagggggtgcgagtgacgacgaatggatgcgcgggaaggcacgagagcggtngnagngnncgngncggcccccaccgcgntcgccgcgcgcgcgcgcggcgcgccnnnnccacgcccacncnccccgcgcncnccgcgnnnnnnngnccccgccgaccacaccnacacaccgcacgcacgcagaccgcagagagaga

SEQ ID NO: 12940 - DNA, 431 bp, Glycine max
  Coding DNA Sequence Number=SeqID_3161
aacagcaaagttcgaatctctctccctctctatctcttataatggctctctcaaaatttctagggttcattctcctcgccgcttttttcgtttcgttcacggttgctcaatctcctgcaccagctccatctagcggaggaaggcggatctctccggcgcactcacctaagaaggcgatgtctcctgcaccagctgtttctcctactcctcaaaccgcattgactccagaatcttcctcctctcctccatcgccaccctccgcagattctccttcagatttgccggctttttctccctcttccatctccaactcgcctgctcaagctcccgctcccgtaagcggcaccgtttctaacaactacgcggtctttggatccgtcgcttttatgttaaccgctgccgttttggctatgtaggttctttgcatgaat

SEQ ID NO: 12941 - DNA, 284 bp, Glycine max
  Coding DNA Sequence Number=SeqID_3162
tcaggttcaactatttcacccaccccccccgcagggcgttgcgtgttccgggctattaccagagttggcacattggcgtgagagctaagacgtcgaagaagttggttgctttcatcaggggcatccccgccaggatcagggctaatgaggagggtgtgacgatggccgaagacaatttcctgggtgtgcataagacgatcaggtccgagagacttggccctcgtatgatcccggcggcccccaggagcggtcatgtggagcagttttgggcagcgggcctatac

SEQ ID NO: 12942 - DNA, 346 bp, Glycine max
  Coding DNA Sequence Number=SeqID_3163
aaacaatgtgaagggtcatttttcaaatttgtcagcagaaatgattttagattcaaattagcaatctagttccaattttggatctgaagtggtgtatgctgaaccagctttttttgttgcttttgcaaagtctgcaagcagaatcagaagtcagcaaaatgctttgtcaggggcgattttgcaaatctgtcctgcaaaacatttttaggcagcaattttgacacggattccaatattgaatgctcagtgttgtataatgaaaaattgtgtttcggtgtttttggggagcatgcaggcatataggatggaggcaagaaaatatgtttttagacttgctttggtggta

SEQ ID NO: 12943 - DNA, 307 bp, Glycine max
  Coding DNA Sequence Number=SeqID_3164
taaaaacaagcgttcaattcttagtgatcgctgcctctctctttcccctctttccaaaaaattgtggggtcaggatgctgctatggggctggtgctgattgctgcgatcggcagaggatggaccacgggtttatggatggaatgcccctctgttcctgcagttggtaggtatatctaatcagggacggtgtatcatttcactttcacttgttctctcttcacgaattctcctaggagtctgatgctggtggctattacctgtaccgtgtgtggcctgcatacttcataggctatttattcgcatgct

SEQ ID NO: 12944 - DNA, 492 bp, Glycine max
  Coding DNA Sequence Number=SeqID_3165
cgaggcagatattcgtcatcagaatgctgggggagtaaagagacaacgaactacgggccgacgacagccaggtctcctcttctaccacctaggctcgatgattacatatatgacacgatctggcaagtgatatggtatgtggtgggatatatagtaaattttttattttattattaatatgatcgagcacatgtttgatattcttatttagtatatctatataaattaaaaatgagttagggaacaagacactctctacacagactacaagatttcgtctgtagtatacgtgtcgctgggcagcgccccggcgacgttctttctttttcatgctatatatacttgtatatctattaatattatttattagatatatattcatatatatcctatccaagcaagtggcggagacgagagcaacaacgaacgaagagcgacttgagtcgagatccgccgtgtgccgcgagagatatgatgtgtgtcgggcgccca

SEQ ID NO: 12945 - DNA, 393 bp, Glycine max
  Coding DNA Sequence Number=SeqID_3166
gattctcgagctctaggacaagtcttgttgtgtatcgatctgtggtttgcgtagagttcccatcgaagatgaagagaatattcggtgcgaagaacaacaaagaacctccaccctccatccaagatgcctctgatcggatcaataaaagaggagagtctgtggaggataaggtgaagaggcttgacgctgagctctgcaagtacaaggaccagatcaaaaggacacgccctggtcctgctcaggaagctatcaaagctcgtgctatgcgagttctcaagcaaaagaaaatgtatgaaggacaacgtgacatgctttataatcagactttcaaccttgatcaagtttcttttgctgctgaaggactcaaagatgctcaacagactatgacagcgt

SEQ ID NO: 12946 - DNA, 465 bp, Glycine max
  Coding DNA Sequence Number=SeqID_3167
ttttttgttattgtagtccttcttgtttgcttttctttgccttttccatttctttttcttaactttgattggagtgttgacccagaattttcttggtctggttaacagtttctcaagtttgttcttttgggttctcctattagcttctgaaagtttccattttttcattttctagtctgagtttttgtggaattttcatttggggttaattcggtgtcttttgtgagttttttttttctacgacttatcaattctgtagtatatgaattttttttaaaaaaattgttttctggttttactattagtttattactgttgctgcttttgtaaaaaaaagtttattattattattattattattattattattattattattattattattattattatgttctatacagatctcttgtgattagggtggtcagaaacgctttattcctcactgaagtttggtaattg

SEQ ID NO: 12947 - DNA, 527 bp, Glycine max
  misc_feature (93)..(93): n is a, c, g, or t
  misc_feature (332)..(332): n is a, c, g, or t
  misc_feature (371)..(371): n is a, c, g, or t
  misc_feature (380)..(380): n is a, c, g, or t
  misc_feature (400)..(400): n is a, c, g, or t
  misc_feature (405)..(405): n is a, c, g, or t
  misc_feature (453)..(453): n is a, c, g, or t
  Coding DNA Sequence Number=SeqID_3168
tatactcgtagatgagccgcgtcgtcgctctacgcgcatcccgcgacgtgtatgtgtgttgtctgtatgtgtggtgtggtgtgggcgtcgtgntgtgtcgcgtctcgtcgtatgtcgttcgcgcgtacgctcgtcattacatagagcgtgcgcggatactactgtatgtagccagtcctagcgagcgataacatgagttggatatgaggcatgagcgcgatcctatatgctgtccacccccacagcgtcgcgaccaccctacacctgctcttcatgctcgcagaggagaggacgccgcacactgagcgtgtctgaggcacgtagctccactntcacatccgatcctatatgctgtcgtcactgctagtganttatatgtntatatcactgatatgttgangatanaatattgtgctatctacgacgcatggatgcacagcatgattgatgcgntatcaccagtgatctcatgcgtcacgaagctagtgtaagcagatatatagcaggcgcgtctgtgctatggatca

SEQ ID NO: 12948 - DNA, 373 bp, Glycine max
  misc_feature (54)..(55): n is a, c, g, or t
  misc_feature (58)..(58): n is a, c, g, or t
  misc_feature (100)..(101): n is a, c, g, or t
  misc_feature (105)..(105): n is a, c, g, or t
  misc_feature (108)..(108): n is a, c, g, or t
  misc_feature (119)..(120): n is a, c, g, or t
  misc_feature (181)..(181): n is a, c, g, or t
  misc_feature (211)..(211): n is a, c, g, or t
  misc_feature (220)..(220): n is a, c, g, or t
  misc_feature (282)..(282): n is a, c, g, or t
  Coding DNA Sequence Number=SeqID_3169
ccctcatcatgagccttaggattgtatcgagttgttgttttcgacagctgtctnnganagcattgaaggtgaaactattgccctgccaaattagactgannagtngcnttcctgtgtcnngagctttagtggacgtttcaccccttcggacagcaaccactaaccttcaaccctgtcggtncaaatcgaagaaaagtcgaaagaaggaccnaaagggacnagatgaggaggaggaagaggatgatgatgaaaaagacgaagttgatgaacatgaggatggancattaccaggagagaaagaaagggtcctaaaagtcggtcaagttagaacagataaagttttgaagttagcaactcattcggctaggatggt

SEQ ID NO: 12949 - DNA, 182 bp, Glycine max
  Coding DNA Sequence Number=SeqID_3170
aaaaccttcgattggacttagagctttcttttcctggttttgattcctatagacagtgtcttaaaagcatcggctaagagatctttacatagaaagtcacttttttaagggttgcattgaaaataatgggaacgtatatggttattctttctaatcaaatccttgtcattcatgtttttggg

SEQ ID NO: 12950 - DNA, 458 bp, Glycine max
  misc_feature (121)..(121): n is a, c, g, or t
  Coding DNA Sequence Number=SeqID_3171
gaatacgaggctgcttggctcacatttccccactgctcccccctcctccacctattcacccacaaccccttcccacaccgccgggatcatgtaaacagcatatccagacaccgctcgacangtgtacgcaacgaactaaccatacactatttatgttatttacttttctctacactattgatgtggcgggcacataaaacaacatcacacaacgtggtcggtgctatgtcgtgcccgtgcatctatcactttctgtggtgtacgacaaagcgggttgtctcatagtaacaattctcccacgcaccgcccccgcccctcactcgcatttccgtactaagatgaaacccgccctcatcacactacccgccacatccgctcgcgcgcagcagacatattagtgtatggacggggttgtcacgcgcccgttggctcgcctctcaccgactctattaacttat

SEQ ID NO: 12951 - DNA, 455 bp, Glycine max
  Coding DNA Sequence Number=SeqID_3172
ggtggtacaacatgatgatgggcaaggtcgacgacatcgccgccgccggagtcacccacgtctggctgcctccgccgtcgcactccgtctccacccaagggtacatgcctggccggctctacgacatcgacgcgtccgagtacgggaacgcggcggaggtcaacacgctcatctcagcgctccgcgggccgggaggccaagggggggtcgcagggctcatcgcccgaacctgccggcgactaccaccacggcccgcggcccccgactggcatcctgggagggggggcaacggggggaagggcccggcctattactggcgggccgccaaggtccacctccccagccgacccagaccccccaacgggggggcccccccccaatggaaatttggcgcccggaaagaaaacccaccccaaactctcccaaggggtacccgggcaaatctctggaaaccg

SEQ ID NO: 12952 - DNA, 490 bp, Glycine max
  Coding DNA Sequence Number=SeqID_3173
atactagttgcatttcgcgtatactatgtcgtagatctattaattaactacctctaaaacaaacctattatacaaagtccacataggaataaaataagtaaattttaaacctgtatatctacaacattggttattaatcatcttaaagctagaaggtcacatatgttaacaaaaaaatctcatgtgtcattctcttcttccaacataaaagagtgtgtctcaattggttgttttaaatcttagttcacgttggatctacgtatctctcttaaaaaaaaaatccataactacaccaatgcctttttaccctcatcattctttgtccctatgttcacgagagaaaaacaaaagatgtctaccgctttaaaatgataacgttcaccctcatcatcctttgtccctattcccacgagagagacatgaagactccctgagctttacagtgataacatttttactcatactgtagctcaaaataagcagcctaaag

SEQ ID NO: 12953 - DNA, 482 bp, Glycine max
  misc_feature (27)..(27): n is a, c, g, or t
  misc_feature (85)..(86): n is a, c, g, or t
  Coding DNA Sequence Number=SeqID_3174
tttctgggtgttctgctttccctgacncgggggcttgttgaccccgaataaaaaaggctttttttcggagctttgtttccctttnngggggcccccgttgttttaataaagtgaacgtgtttgtggccaaagagggggggcaaccggttcatggccttaatcccgggttgtagttttgtttcccttttcatgggggggagttagggccacacttccccccaatgtttggggtggaaaaaaatgacgcgttgaacttcatcgaaaaaatttttgacgagagattttgatgcaaaatttgtttatcgccgttgccaattccccctgtggggcaattcgaggggtggggcaactatatgggaaagggcaaactggggggggggtcctatttttaaattacgagcagcctgggggaaaaggggagttttttttcaaacgcgattttagttgggtaacgacatggttttctccagtcgcgaaagttt

SEQ ID NO: 12954 - DNA, 598 bp, Glycine max
  Coding DNA Sequence Number=SeqID_3175
gaatgaactatcctggccatgttgagggtatgcaccctaaccacatggtttatagacaagaaacacctaaacaaaaagaaggcaaactttttgaaaacttcttcatgaattattctgattctcatgttaatgaggctggatatggtcagacatacactgaaggtcctgagtgtaccaattatatgtatttcccccgtgaatttgattctttcaatgacatggtcacctcgttacaaggaaattcatcccacgttgatgatcttactcaagaggaattaatatgcctgtcggaacagacgatagacatatcaagatggaacatggaatgaattatgatgagagcgcagaaaactatctaaactgtcccttgaagggtttaatggataatcaaggcatgtttagacaagctctgagaaaatcatctttctttagttacaacggaaattctgctggcttaagaaagagctctatggatttcttttaatctgttataaataaatgctaatagcgattaaccttttgcaaactcattttattaagatcaaacttttttctgtgttgctatatatttttttactctcactaactaccaacttat

SEQ ID NO: 12955 - DNA, 469 bp, Glycine max
  misc_feature (353)..(353): n is a, c, g, or t
  misc_feature (399)..(399): n is a, c, g, or t
  misc_feature (438)..(438): n is a, c, g, or t
  Coding DNA Sequence Number=SeqID_3176
gagacacggacagcggcagacaaatagccacgatatcgacgagagtgagtcgatttattcgttaatgtgaggtagacgatgtgagtggtaagggaagggccgcacgcaatatgaaactgttcagcgatcgctgtcacatcatacatacacaccctcggagtgctacgaattgttatctaactcacacccactcatagtagctcacatccgatgttcattcagtcgcactcgcgcacgacggtgcgtgcacgactgcgattgcatgtgtagcgcgcccgggcgcgcggagaacgacgcacgatgacctgtagtgacgccgcgcattagcttcatatgtactttcaggtgacgcncctctgtgtgtactgcgacgataatctgcgtcatcgcgtacaagancagtgcggaacatagccgctaccgactcgcagatatgantagtgctgacggataggtgacagctcgctct

SEQ ID NO: 12956 - DNA, 183 bp, Glycine max
  Coding DNA Sequence Number=SeqID_3177
ccaccaacaagttctacttcttctacggccaccgcaacccctcccagaaccgccccaccgtccgcggcggcctcttctccaaccgacaaaccctaaaccctaacccttcccaacccaaacccaccaccaaacccttcaacatcaaaaactgggaccctcacttcctatacaacccaaactcaa

SEQ ID NO: 12957 - DNA, 495 bp, Glycine max
  Coding DNA Sequence Number=SeqID_3178
ttttttcgttctcgcctgtctgcctgccctaagccgagaaaccaaaaatcggcgccatgacgaagagcaggaacaagaagaagagagacgacgacaccgtttctatggacgtttccgaaactaagagcgtcgtctctgaatctgctccccaagccatggacacttcggagaccggagacgccaaactcgctgctcgtaatcgtaacctgacaagcgcgaagaaaggaaaacctatgaagagaacgaagaatgcaagaaaggtgaaagctgtggctaaagctatagcaaagaacgacaagtatgaagagaaagcttccaagaacgtttccaaaaaacagagaactctttccgccaagaaattgtatgaatgattttgttctcaactcaaagcgaaaagttttttaaggttaaaggtttcgtagtctatttttgttcttgtgcttatcttagcaaaagaatctctacaagtttgtacttctcctttttagtttcaga

SEQ ID NO: 12958 - DNA, 585 bp, Glycine max
  misc_feature (190)..(190): n is a, c, g, or t
  misc_feature (450)..(451): n is a, c, g, or t
  misc_feature (455)..(455): n is a, c, g, or t
  Coding DNA Sequence Number=SeqID_3179
ctacacacacaccactaaacatattttaatattatatctcaataccttcacactattataaacttactcccaactactctctcaactatataccaacacctaccactactcacaacatcactctactctccaactcactccttactcctcccactccgcgccctcacctctctctcataatgacatactnactcacatcacaaacaaacacactataagaacaacaaatacacaccacatcatatcacactgctcacccctctacccccccacgcctccacctccaattcacttcacacaattctgtcgcttactctatctttcatcctctattcactactgtctcgcgccgtccctctcccctcttctctctatcttcgctactcccacacaccacccttctctcttctaagaaacctacttcctccacaccatacgctctctattctnnctanctcgttcatagcgcaacaacgtgatcgttagttttaggtacaccgtcttatcacgacgccatcatcgttcagtaccgcatactctctccgcacattttcttcttttctgtccttacaaaactcagtctcc

SEQ ID NO: 12959 - DNA, 327 bp, Glycine max
  misc_feature (281)..(281): n is a, c, g, or t
  misc_feature (286)..(286): n is a, c, g, or t
  misc_feature (290)..(290): n is a, c, g, or t
  Coding DNA Sequence Number=SeqID_3180
gtgtcaaaactgttggttggtcaccatgtgggcagtttttagcagtgggcagctatgatcaatcagtgcgaatattgaaccatttgacatggaaaacctttgccgagttcactcatgcagcctcgattcgaagtccctataatgctgctgtatttaaggaagtggatgacccatttcagcttgatatgtcagagttatgtctaagcgaaggcttgtctcgtaacatgcgagacaatggcactgaaaatggctcagaagtaggttctagagtaaaatatgcngtganggangttccaatcaccgtgccagcacagaaaccagctagtg

SEQ ID NO: 12960 - DNA, 446 bp, Glycine max
  misc_feature (114)..(114): n is a, c, g, or t
  misc_feature (277)..(277): n is a, c, g, or t
  Coding DNA Sequence Number=SeqID_3181
tgcgctttaccctacagcatttacagagccggagctcgcaaggaatctatgagagacagtccgtgttgtcgtcttcgcgctcctctcttgtttattctgctgctcacacatccnacttttggcgcatatatcttccacaccatcttacctcttgctacttgaatatatgatctcagcctcgccacacttgtgctgcgagagtccacgtcgccctaccacatccaatataagttatacctaactctccgttctctacaactacgacgcgaccgtctanaccacacacatacacagcgcatgtgacgcgcacagacacaatcgacactctactatcctatcgcataatgatatgtgttcgatatgtcgtgtcttgctgacaacatagtaagctgatcgatacatgcgtcgagcggagacgcatactcacgaccgtcactattgatact

SEQ ID NO: 12961 - DNA, 305 bp, Glycine max
  Coding DNA Sequence Number=SeqID_3182
cctttggggttgaatctctaaatgtttcatttcaaagggggtgagcttgaagccttctcttcaatccgatctttgcctgctgaatctgctgcatcaaggattcagtggcctaacagggaagcaattttcttgttctgaaggctactaaaagtgaaaattccaattcctgccccctgaaatggccaaggcaccctatggttgctccatcgaaaaaaaaaaaagggcataaaggaaaactctccgggggaaatacccccaaaggaggttcacataatgcgatcagggcccagagttcaaaaccttga

SEQ ID NO: 12962 - DNA, 274 bp, Glycine max
  Coding DNA Sequence Number=SeqID_3183
taaggaaggccttggtgcaagaagcaaaggcctttggcggttccaccggtgattttggaaccttcgaaaatctattataccaatccatccttcccgggggtggcaaattactgcccaaaaaaatgcccgaattgtatctctgtttgctccgggaaaatggcaaaatcgggttccggagagaagctgatggaagtggccggtgatcgaaagaattgggtgaagggtcaagttgttcgatcaaagtcatgggggttgccacaagataagattagaa

SEQ ID NO: 12963 - DNA, 501 bp, Glycine max
  misc_feature (82)..(82): n is a, c, g, or t
  misc_feature (118)..(118): n is a, c, g, or t
  misc_feature (240)..(240): n is a, c, g, or t
  misc_feature (273)..(275): n is a, c, g, or t
  misc_feature (277)..(277): n is a, c, g, or t
  misc_feature (334)..(334): n is a, c, g, or t
  misc_feature (338)..(338): n is a, c, g, or t
  misc_feature (380)..(380): n is a, c, g, or t
  misc_feature (403)..(404): n is a, c, g, or t
  misc_feature (427)..(427): n is a, c, g, or t
  misc_feature (437)..(437): n is a, c, g, or t
  Coding DNA Sequence Number=SeqID_3184
actatgcaccctatactgtgtattgacatagacgacctcatactatgtcatatatacagcttagacgatgtggatgcggccnttctcaaatcatgactacctattatagaactgctanaacaattcagatcagatcgttgacttatatggaggtcgccgtagactatatagtatggagatgagcgattatctcatatatcatatcgtagcgcgagcagaacacatggcatgatgtgaacncactgtagagtatgaggtgtgaactaaggtgcnnncnttggtatcgttgtatcgatggaatcgaccatagtgccacagtgcggcgagattgtgntctnacgtatacatcactcaacaacatatatacgagagagatacangatatatatacttcatattgtcnncctctctctcacgacacatgctntctcatatantaatctatataattgcactgacacagttataccagatctacggatatctaatcactatgtgcag

SEQ ID NO: 12964 - DNA, 473 bp, Glycine max
  Coding DNA Sequence Number=SeqID_3185
agggcgtggccaatctggcaccgttcagtttctttcaggtgatcagtgacaacccgccgaccttgctggtcaacgtcaacacccgcgacgatggcagcctcaaggacagcctgcgcaatgcccaggccagcggcgagctggcgattcaactggtcagcttcgctcaggccgaggcgatgaatgccagtgccgcgatcctgccgcatgaggtcagcgaatttgcccactgcgccattgccagccagccgtgcgcgcgcatcgacgtgccgcgagtcgtcggcgccccggtgaccttcgaatgccgtgtgacgcaaatccagccctatccggcgcagcaacccaattgtcatctgatcttcgccgaagtgttgctggcgcatatcgatgacgcagtgctcaacgagcagggacgcatcgacccgctcaaacttgatctggtgggtcgcctcggtggtagcgcctattgccgtaca

SEQ ID NO: 12965 - DNA, 534 bp, Glycine max
  misc_feature (328)..(328): n is a, c, g, or t
  misc_feature (508)..(508): n is a, c, g, or t
  Coding DNA Sequence Number=SeqID_3186
gacacacagacaaaacacagtaaatattagtagaaagaacaccgacatacgatataataacgagtggcaaatagaatataatctgtatatctgacttatataacaagagagttactaagtattgattaatattagtgattacaattttgtatttggttctctgttttagtgcgtcctttgtctctgtcttgttgttgcgtacgctttgtgggatgtgtggtgtggtctctgtttgtgtgtagcacggtatgggagagtgtatgtgtgtgtgtgagtgatgcccgcctcatctattttattattctgacacgttcaccattccgccttntttttattttgtttgttgttatctattgttggtgcgcgtcgactatatttatttgttatgtattgtcttcgtcctatagtgtttgttttttaattatgtggagtcctcccaaaggggagtgtgggagtgggattgctgttgtacggagagtggtatggtgttagggtttataataggttngtagggtttgttctagggtaatcttg

SEQ ID NO: 12966 - DNA, 183 bp, Glycine max
  Coding DNA Sequence Number=SeqID_3187
ttagaacaaatttccaatggaggtttcccatggttcttgggaacttgtgtggaccatacacttgcttccttgatgccactcttccaatggatcagagtgtagtctaagttcagaaggttcgtgtccgtaaatgcagaactgaggagtgggagtatagctatgtagggtatgtctacactggct

SEQ ID NO: 12967 - DNA, 408 bp, Glycine max
  Coding DNA Sequence Number=SeqID_3188
ccaaaagtacactgccaggcttcaaacaaccaaggcaccagcaagaatggaacaacccacaaaccaaacttaatgggcaagcaacgcttcaatcttctttttttgtaacgcaacaagcaagccgtaattcagcaactttcaacagcagcaacccattgcacagtgccctggggtcgagttcggggctccccctcctgcaaagtgaaggcaccaatgtgaatgtgggaaggagggtttcctgactttgtgcgtggcggcagccccccaggggagggtttgcccagtggtggaaggggtatccttgggaagtagcaaccaggaaatggggggttcaagtgaagcccccggtgaagggggtgaaaacctctccctcaaagttgttgatgatggaaactaggtagctacccc

SEQ ID NO: 12968 - DNA, 313 bp, Glycine max
  Coding DNA Sequence Number=SeqID_3189
gaattcggctcgatttacagccgcgtggtacatttcagtcaaggacgccactgctaggggcaagattgattcagcatcacttctgttaacgcacttccatgattgttacgttcgggggagcgatgccacagcgctgctaaattcaaaaggaaacaacaaagcagaaaaagacgggccaccaaatgtttctttgcatgcactctatgacattgatgcagcaaagaaagcactagaagcttcatgccctggtgtggactctcgagctgacatccttgctctggcagcaagggacgcactcattctgtcaggagga

SEQ ID NO: 12969 - DNA, 573 bp, Glycine max
  misc_feature (69)..(69): n is a, c, g, or t
  misc_feature (361)..(361): n is a, c, g, or t
  misc_feature (449)..(449): n is a, c, g, or t
  misc_feature (471)..(471): n is a, c, g, or t
  misc_feature (490)..(490): n is a, c, g, or t
  Coding DNA Sequence Number=SeqID_3190
gatgttgcgcgtaagttccgcgtgtcgcacgagaccgtgatattgcatatatctctgtcactattgacnactgagttctgtactagtacactccatactcagcaaccgatttgtaagagcgtatgaagtactaggagtgcgtctcgcgtcggcgtagttgtaacgtctgctgtctaggatctcgacggcgtggacatttctactgcagatgtattgtgttatgtcgggcatggatgttgatcgttgtacatgcgtgatgtgtatactgcggtgcgtgtgcaaagtatcaacgagagaatcagcgtgattacatgcacacgtgtatagtacgagagtcctgtatcgatcgtgtccgcgcctntgtatctcgagcttgagtctgttactctcgtctgatggttatatagtccgttcatactctgctgtctatactgtatgcatgtcagcgnatgtcagacgatgctttgagantggtatagacgcgatgagncactatatagaacgcgctatctccggtgcattgcacagctcggaagtacgtcatcataacggcgagacgcacgaatcttatgg

SEQ ID NO: 12970 - DNA, 445 bp, Glycine max
  misc_feature (48)..(48): n is a, c, g, or t
  misc_feature (56)..(56): n is a, c, g, or t
  misc_feature (66)..(66): n is a, c, g, or t
  misc_feature (294)..(294): n is a, c, g, or t
  misc_feature (339)..(339): n is a, c, g, or t
  misc_feature (372)..(372): n is a, c, g, or t
  misc_feature (375)..(375): n is a, c, g, or t
  misc_feature (378)..(378): n is a, c, g, or t
  misc_feature (382)..(382): n is a, c, g, or t
  misc_feature (397)..(397): n is a, c, g, or t
  misc_feature (400)..(400): n is a, c, g, or t
  misc_feature (402)..(402): n is a, c, g, or t
  Coding DNA Sequence Number=SeqID_3191
atttgtgtgatggttatagaagcgagggtgattgtgcagggctcaacngctatcanggtggttagngtgtgatagagaggaaggacggagacaaatgttggtgagcagtggtagtgttgatgtatgcatagtgatgtgtgagtgattgttgcgggataagttgcgagttgattagtagagatactgatatgtattagtagagttatgtcatctattgtatgatagaggatgtatgttatgatagtatgtgtagtattagtatggatcgggtggagaagtagacgtgtgagaganagagcgaaaagtatagagagaggagacgtgatgatatagggtagnacgtcgtatcgtgtatcatggagaggcacgggnggntgntagnggagggtggtagagncgngngcgggtgtgtggagatgaaaatatgaggaacaacataagcact

SEQ ID NO: 12971 - DNA, 585 bp, Glycine max
  misc_feature (57)..(57): n is a, c, g, or t
  misc_feature (92)..(92): n is a, c, g, or t
  misc_feature (134)..(134): n is a, c, g, or t
  misc_feature (180)..(180): n is a, c, g, or t
  misc_feature (232)..(232): n is a, c, g, or t
  misc_feature (240)..(241): n is a, c, g, or t
  misc_feature (275)..(275): n is a, c, g, or t
  misc_feature (282)..(282): n is a, c, g, or t
  misc_feature (285)..(288): n is a, c, g, or t
  misc_feature (295)..(295): n is a, c, g, or t
  misc_feature (300)..(300): n is a, c, g, or t
  misc_feature (305)..(306): n is a, c, g, or t
  misc_feature (315)..(315): n is a, c, g, or t
  misc_feature (342)..(342): n is a, c, g, or t
  misc_feature (361)..(361): n is a, c, g, or t
  misc_feature (415)..(415): n is a, c, g, or t
  misc_feature (461)..(461): n is a, c, g, or t
  misc_feature (477)..(477): n is a, c, g, or t
  misc_feature (491)..(491): n is a, c, g, or t
  misc_feature (499)..(500): n is a, c, g, or t
  misc_feature (502)..(502): n is a, c, g, or t
  misc_feature (510)..(510): n is a, c, g, or t
  misc_feature (515)..(516): n is a, c, g, or t
  misc_feature (518)..(521): n is a, c, g, or t
  misc_feature (523)..(524): n is a, c, g, or t
  misc_feature (526)..(526): n is a, c, g, or t
  misc_feature (529)..(529): n is a, c, g, or t
  misc_feature (532)..(533): n is a, c, g, or t
  misc_feature (541)..(541): n is a, c, g, or t
  misc_feature (547)..(547): n is a, c, g, or t
  misc_feature (550)..(550): n is a, c, g, or t
  misc_feature (557)..(558): n is a, c, g, or t
  Coding DNA Sequence Number=SeqID_3192
tcggtagagtgggtatgaaatatatatcatgatagatctgtgtgttctcctctcaantaggtgagttggtgggatgagacgtatagaacganaggtggtggagtgagtgtgttgagtgatggatgtagtagcanccaaacacgacgcaccacggcgatccagaaagacgaagacacaatnaagagcgcacggcgagcgactcacacaaaatataacaataacgacaagacgnaggagaannttacacacactcgcgctctcaacacacatatatnaaagatntgnnnntttctgnccccncctgnncccataganacacacccagagcgagagaagtaatgntacccactcattcaaggtngctgtataaggtagagcagccatgttatgtgttagaacattgcgtggcgtagtntagatagtataatgcttatcgtacaatctatcttgatgagcacctnattccaatcagcatcnaataatatatattnaatattcnntnttttattntttcnncnnnntnntnttntanntaattttntttgtnttncctcctnntatccttctgcgtgttgtgtctcgccc

SEQ ID NO: 12972 - DNA, 462 bp, Glycine max
  Coding DNA Sequence Number=SeqID_3193
gtcagtttactgtctttattcagagatgacaaagaaacacatacaaggcgatgcgcgtgtggccgtaacgacgtccgcagcagcaacgcaaacagaaaaggccactgtaaaagctaaagcagcatatcaaccgaatctaccatctgccaccggagtacacggcggaggtgacgccggcggccgcggccgcggaggcttggccttcggcggagggggcgccttcaccggcaccctctgccccagagacctcgctcccctcgctgcagttctgcggccaccatgggctccctccgccgccaatggcaccgcgcttcacaccttggctacgccgctcgtgccaacggtgtagcgcgatttgccgacggacgtggcgcaggagcacaagaggagggccgccatgagcagtgaagtgagcatcttcttgcagtacatgactgagtgtgcagtcactcactgagctag

SEQ ID NO: 12973 - DNA, 525 bp, Glycine max
  misc_feature (276)..(276): n is a, c, g, or t
  misc_feature (431)..(431): n is a, c, g, or t
  misc_feature (479)..(480): n is a, c, g, or t
  Coding DNA Sequence Number=SeqID_3194
cacgagcaggcggttatttactacaggagtgtagccctacacttgagagaaccgcgtctgtgccgcacgctacagacacataattgtcactattatatattcacctccggccgcctgtccacgcaccccgcgcatctgactttctatagagacaaacgaacagaacaaatacaacaagttgaactacgtgacggtcgccgatacgagcggagctgtcgagctcgcctgtgcgtcgaggagctcttacgccgtctacgttttccgcctctgctggcncctctcagcacgcgacaatatatgtcgcatgtgctcttaccgctctgcaatagtgtgggacaggcggcgatctatccctgcttacattgttgatgacgcactgcgatgacaaatgcgatgagttcgagacgcctcatgacgtcatcttcacttgnctagatattcgcgagaatgtatattgtccctacgagactattgttctnntagtatactatcatccacgcgactcaaccactctatatcacttgg

SEQ ID NO: 12974 - DNA, 528 bp, Glycine max
  misc_feature (36)..(36): n is a, c, g, or t
  misc_feature (46)..(46): n is a, c, g, or t
  misc_feature (58)..(58): n is a, c, g, or t
  misc_feature (83)..(83): n is a, c, g, or t
  misc_feature (89)..(89): n is a, c, g, or t
  misc_feature (94)..(94): n is a, c, g, or t
  misc_feature (105)..(105): n is a, c, g, or t
  misc_feature (109)..(109): n is a, c, g, or t
  misc_feature (136)..(136): n is a, c, g, or t
  misc_feature (140)..(140): n is a, c, g, or t
  misc_feature (146)..(146): n is a, c, g, or t
  misc_feature (211)..(211): n is a, c, g, or t
  misc_feature (229)..(229): n is a, c, g, or t
  misc_feature (256)..(256): n is a, c, g, or t
  misc_feature (263)..(263): n is a, c, g, or t
  misc_feature (272)..(272): n is a, c, g, or t
  misc_feature (274)..(274): n is a, c, g, or t
  misc_feature (281)..(281): n is a, c, g, or t
  misc_feature (284)..(291): n is a, c, g, or t
  misc_feature (301)..(301): n is a, c, g, or t
  misc_feature (303)..(303): n is a, c, g, or t
  misc_feature (308)..(308): n is a, c, g, or t
  misc_feature (327)..(327): n is a, c, g, or t
  misc_feature (362)..(362): n is a, c, g, or t
  misc_feature (370)..(370): n is a, c, g, or t
  misc_feature (373)..(373): n is a, c, g, or t
  misc_feature (375)..(376): n is a, c, g, or t
  misc_feature (379)..(382): n is a, c, g, or t
  misc_feature (386)..(386): n is a, c, g, or t
  misc_feature (391)..(394): n is a, c, g, or t
  misc_feature (396)..(397): n is a, c, g, or t
  misc_feature (399)..(399): n is a, c, g, or t
  misc_feature (401)..(401): n is a, c, g, or t
  misc_feature (408)..(410): n is a, c, g, or t
  misc_feature (466)..(466): n is a, c, g, or t
  misc_feature (469)..(469): n is a, c, g, or t
  misc_feature (496)..(496): n is a, c, g, or t
  Coding DNA Sequence Number=SeqID_3195
gtagtgtgcggcgtcccgttctcgctcgcgcacgangcggctgtgngggtctgctgcntctcccgtgctgcacgccgcgcgcnaccggnccgcncgccaccgctngatngtccttgtgccgcagtggtgggtgggntagngagatncactcttcagtgcgagggtagttgcgttgatagctgaacgccggggcgtgtgcgctcgcgccagncatcgtgggagcggagtncacagcagacgacgcgcgagagagctngcgcgcncccgtgtgngngtcgccnccnnnnnnnnctctatgcangngaagnggtccggtgacgcgactcngtacagatagaactgtggagcgtgaggtatggtgngcgcgagngantnnctnnnncacnacccnnnngnncncncgccttnnnctaccatgacctaccatacatgttcatagtggctgcgtgagatcgtagaatcacgncgntgctagcacatctatgctcacaaatcntctcacggacagcggcacaggccatagactag

SEQ ID NO: 12975 - DNA, 426 bp, Glycine max
  misc_feature (237)..(237): n is a, c, g, or t
  Coding DNA Sequence Number=SeqID_3196
ttcggtcgttccatttcgctgaagatccactccactcccttttcagaatccaatcctcgccgccaccggagaagggtcccggcagcgtgctttctatcggggagctcgcccgagtgaaatctcgttaccgaaacccaaactgcaaaatggcgaacaacgtggcaaaaccaggtgacaccctcaaacggtggccctcctcaaaagaaaggggaggggaacgaggaggaaattcccgcnaacaccaccaaaaatctcctgggccgggtgctggaacccgctatggccctcaagaactttggggggggccccacttaaaagggctcaaggtggaacaacctagccccggcgcgcaaaaaaaagagccctttatgaattttttttagggaagcttccctccttcccaaggggctgacaacgatttttccg

SEQ ID NO: 12976 - DNA, 180 bp, Glycine max
  Coding DNA Sequence Number=SeqID_3197
taggccctattacttgaacattacaaaatatccagagggaccctctacagcctatctactcgcatgctagcttggaactggacgctgattgacaacgaaaaagactgggagaacccttatgatactcaagttaatcagcttccaggagatcctcctatagccacctgcaggcatagcaaa

SEQ ID NO: 12977 - DNA, 389 bp, Glycine max
  Coding DNA Sequence Number=SeqID_3198
tttcctcttcctcatgctcattgtttgctcttcatcattagtgaaaggctctgtccagcttgaaggcgcaaagatgcatgagagtttcatgctttacaagagtgaggaggtggaagtgaagaagatctcgagtcacaggaagttgatgttccactcgactacggactacgacgacgcaggagccaaccctaagcacgacccaagaaggaggcccggaggcaaggcaagccttgaattattcaacatacgattctctctcgctctctctatataaattagcctatatataaacacatgcactagtatctatatatatgagtgtatgtatcctattctgacattttgtttggatgagatcgttgtacaatacccttcggaaacgcttcgtg

SEQ ID NO: 12978 - DNA, 491 bp, Glycine max
  misc_feature (69)..(69): n is a, c, g, or t
  misc_feature (109)..(109): n is a, c, g, or t
  misc_feature (152)..(152): n is a, c, g, or t
  misc_feature (158)..(158): n is a, c, g, or t
  misc_feature (178)..(178): n is a, c, g, or t
  misc_feature (184)..(184): n is a, c, g, or t
  misc_feature (186)..(186): n is a, c, g, or t
  misc_feature (206)..(206): n is a, c, g, or t
  misc_feature (237)..(237): n is a, c, g, or t
  misc_feature (249)..(249): n is a, c, g, or t
  misc_feature (282)..(282): n is a, c, g, or t
  misc_feature (320)..(320): n is a, c, g, or t
  misc_feature (330)..(330): n is a, c, g, or t
  misc_feature (346)..(346): n is a, c, g, or t
  misc_feature (350)..(351): n is a, c, g, or t
  misc_feature (371)..(371): n is a, c, g, or t
  misc_feature (385)..(385): n is a, c, g, or t
  misc_feature (387)..(387): n is a, c, g, or t
  misc_feature (395)..(395): n is a, c, g, or t
  misc_feature (398)..(398): n is a, c, g, or t
  misc_feature (434)..(434): n is a, c, g, or t
  misc_feature (438)..(438): n is a, c, g, or t
  misc_feature (461)..(462): n is a, c, g, or t
  Coding DNA Sequence Number=SeqID_3199
gctgcagatgatgcgcacagatcgtctgagatcgtccctctcttagtcgtccttcattgatactatagnacacatggcgcccgcgatcatacaagtatcgaggcgatcnatacgcgccgtgacgtcgagaatacgactaactgctactaccnctctcncgtagagtcatgtctaagtnggagcntncgtgggctgtagcacgaggnccctatgaccgtgcgagagtcggtcttagcntgctgtgagcancagaagcatcatacacccatacgagactttacnagaggagaaggtaggactgatgactagtaatagagtangagactaganatggctgtagtatgtntgtnntctctcgtctctctatgtgnactagtaagtgagngngatgctcntgngtgctttgctgatagttatgatggggggagagctgnatcntttgcctcacgtatcatagtatnngagggggcgacgcgcatcgatgtctattg

SEQ ID NO: 12979 - DNA, 585 bp, Glycine max
  misc_feature (259)..(259): n is a, c, g, or t
  misc_feature (438)..(438): n is a, c, g, or t
  Coding DNA Sequence Number=SeqID_3200
tgcgcgcttgtctctctaaggatagtgccgttgatctcttgtagaataaaactcatagcgtggagctgtgcgtgagataaagactggaaatgaaggggtaatgagggaaatggtaagaggacaaagtgaataaggtatctgtagtacttcgagtgaggcggctgtgctaaaggtctttaacgaaggtcgatactggactatacaagatacccgggcgggcgtcactataacgcgcgggagcacacggtgagtttaatgnggaagagtatatcggctatcgcggacacgtcgtggcaaatcgtcaataaaatatacacctattcgtagggagaggactattcgcgtctatggtgctataatagacgccacattgtgagtgatgttatgagattatgagtagcagatgtgagcgtcgctgagctgagatagcatatgagncacaatagtggagtgatatcttcttggcatgtctctcggcgggcatcctgagtctaattctcatagtaggttggtctcgcgcggccggctccctgcgggccgtctctccctttctgccctcttacccacgcgcgatattatatttgt

SEQ ID NO: 12980 - DNA, 555 bp, Glycine max
  misc_feature (210)..(210): n is a, c, g, or t
  misc_feature (264)..(264): n is a, c, g, or t
  misc_feature (343)..(343): n is a, c, g, or t
  Coding DNA Sequence Number=SeqID_3201
ttgttgtgtgtatcgttctgttatctatgagattgcgagagagaaatgcgtggatacggaacggagtaaattcagttcggcggttgtgttcgtgtggtgtgtgctagtggggtggtgcgtttgttgtggtgcaataaactgttggtggttcatctttgtgtaatgatagtaaatactttcacccattatttgtgatgaaatacaagcggncgattacagtggcgcttgggggggcggcgggcgaagattcgcgcgcgcttcctntgcccgctcgcttagcataacacaatatttttatggacttcgtctagaacaaaaacacagtaaggattaaataagaatnccacatagcgaaaatttattatcataaataactaaggtgtaggtgaggggcggagcggtggtatcttatgtgtagtctgctcatgctcgttctgctgtgcacagtaatgtgccgtgtcaagcgcgcgagaggggagcacatcgtagatttcttatgagtctgcgcccggcccggtctgtcgcgccggagtcatgtcaggtctctcgcaaaac

SEQ ID NO: 12981 - DNA, 584 bp, Glycine max
  misc_feature (52)..(52): n is a, c, g, or t
  Coding DNA Sequence Number=SeqID_3202
gagatcatatataaccacccacgcgagacgttggtatatataaacacctttncgcgtgtcgttggtcgtgggtaggaggtggaggatgcgcgcagaacagcagcgtgggtctttgttattccgtcgccgccgttcgagacaataacgcggtgcaggggcattgagggggtgcggcgattaatatagagaaattataaggcggcgcttatagctcgccaatattattttaagtatattgatgaaggtagtacatgaacgcggactgcggtcgggtggcaactacatcacataaatggagaggatgccgcgttaacaagatgtcggtggcgcgggcaatccggtgtgacgacaacgctcttggggtgttgcacacgagtgttgttatctgtgtggtgtgcgcgagagcgacgcataaaaaccagtaatgtatgcaacacatcacatctcgcacggcgcgcggccggactaaaattatactatatattcgtgttatcgcgatacgatagcgaaggggcgtacgacaacagagcaagcgcaagaaagagacggcgatcggggttcgcgggtcggcaccttaatggtga

SEQ ID NO: 12982 - DNA, 223 bp, Glycine max
  Coding DNA Sequence Number=SeqID_3203
ttgggtagcggcagtcccctcgagttagctaggtagtcggtgattcctcctcttgatagtcagtcatatgtcagcactggtgttaaaggcacttttgggtgatgttgatcctgagtatttcaggtcccggcagctgccagaaaaatgtgacgtatattcatttggggtggttatgttcggaagtgatgtgtacaagagcacagagtgtgccatcagcatcaac

SEQ ID NO: 12983 - DNA, 583 bp, Glycine max
  Coding DNA Sequence Number=SeqID_3204
aatttattgaaagccgtttccgatggagttgttgcactgaaaggaaatgttaagtcattcggaattgttaccacaccgatgttgcactacatggttgtttgtgccaatacaaatggtgcctatggcacaccaaccgaagaaggttattatcagaaattaataactgcattcagagcattacgtggaacggaatgtgaacgtggcaattacaaaaataaacttttattcgatggttcgaatggcgttggtgcacgcaaaatgattcaatttcttaaacggatgaatggtgaactgaatgttgaggtttacaatcaaggtgaagggaaaattaatgaaaattgcggtgccgattatgtgaaaatcaaccaaacagtgccgattggaacgccagccaccgaaccatacacgcgttgtgtttcaattgatggtgatgctgatcgtattgtttacttctttaccgatgaaaacaataaattttatcttttggatggtgatcgaattgccactttgtatgctgggtatctgatggatttggttaccaagtgtggaattgatttgaagttgggcattgtacaaacggcat

SEQ ID NO: 12984 - DNA, 543 bp, Glycine max
  misc_feature (138)..(138): n is a, c, g, or t
  misc_feature (140)..(140): n is a, c, g, or t
  misc_feature (147)..(147): n is a, c, g, or t
  misc_feature (219)..(219): n is a, c, g, or t
  misc_feature (243)..(243): n is a, c, g, or t
  misc_feature (396)..(396): n is a, c, g, or t
  misc_feature (494)..(494): n is a, c, g, or t
  Coding DNA Sequence Number=SeqID_3205
tcttcttctctaattttcatacacaaacagattgatgacagatagaggttgtattgtttgtgatatatatatattattacatatccatcctcatcacaaccacacagcgttgtcgtatcgtcatcattcaatcgggtncnctgtttngttggtgaaaaagcagacgacgttaattgttgtgtaacgtccattttatctatcactactttccatcactcnttcttgggtcgtctgtccgcctgntcggtttgtggtggaattacatcggtgggatgggtaacagagtattatagacaaccgaccgagtacgagtgttagatgatattctatagtatcactaactctctctacatacatctcactaacatatacaattacaaataattatactcattnaggagatgatagatatatttacaaatcatattgctcatcctattcttactttgtctctcttattctctcctaattccgacgagaccgcgggcggcggngaataattagtaattcaacacgagaggtgtaatgccgttgttgtgtgtt

SEQ ID NO: 12985 - DNA, 575 bp, Glycine max
  misc_feature (162)..(162): n is a, c, g, or t
  misc_feature (274)..(274): n is a, c, g, or t
  misc_feature (279)..(279): n is a, c, g, or t
  misc_feature (330)..(330): n is a, c, g, or t
  misc_feature (409)..(409): n is a, c, g, or t
  Coding DNA Sequence Number=SeqID_3206
gaacgcacatgagtcgacacatatgtcgcatcgtaacaaatgtgatatatcttgatgtaggctcaagttcgatcggaggtaatggacagatatattattgtcagcttacgaggtgtctagagtaaagggctgcataagagtagctgaacgtaggcgacttanaccatgagatgcatggtagcgaatacacgcatgatagaacaaagcgcatacgggcgacgctagacattcatttgtcgcaatcgatacagagtggagacatgagaacgagccngtctnctatatggctgcgtcagagacagcctgcatgcgctagtgatcgattctcangacgtccgcgacactagagtatgagagacgatatccgaacatgcagatagagtagtgccgtgagtcaccacgacatgantgtacgctcatgagcatcgaacatctgagtcgctgacaagtgtcataggacgtcatgccacacgacgatgactataggtgtttcgtcagcacacacatctgtcagtacgatctgacgtgatgcgtagataggtcgatatcaaatctgattctgtcgaatagccgca

SEQ ID NO: 12986 - DNA, 380 bp, Glycine max
  Coding DNA Sequence Number=SeqID_3207
ataattgtcaacgtggaggatgagaataattcggatatggagtcaaaggtgaatgtgaaggaaattaaatctaagaaatcactgttaacaagaacaaaaaatcaaaatgaaatgtcagataggttagaaaaagcagaggagagcgatttaaataaaagcgagagcgttggacaagcaacagagcaatacatgaatatttgtataaataatgaggttgatagtgatggtggcgaaggttttagttttttctatgttaacaagaacgtgtataacaagaccaagcactattttgagacaaaaacagacctgaatgaagtctgctcgtgtgttggagggtgtactgatcctgcgatttgtccttgtgcgaggtacaactttga

SEQ ID NO: 12987 - DNA, 492 bp, Glycine max
  misc_feature (53)..(53): n is a, c, g, or t
  misc_feature (70)..(70): n is a, c, g, or t
  misc_feature (98)..(98): n is a, c, g, or t
  Coding DNA Sequence Number=SeqID_3208
atggacttcatctttatattattaggtggaaaaagaggatagtgagcttcaangctattccaactaccgnaggtaaatgggattagagagcatgtaanttttcttgggatttgtacccgataaagcacttacctcttattgtaaattagctgatttatttgttatgcccagcaaaggggaaggttttggtattgtatttattgaagccataagaaatcaaatggcaattatagctgccaacaccggaggtacacccgaagccctaggttacggaaaatatggcaggttggtagacccggataatattcatgaattagctactgcaattcgcgaggagtattataaaaagagagcgtcaaacgataataattggtctgaaataatgcatttatatggtattgaacgtttttgtaatgaattgaataatcatatacaagaagtacttttatgagtagtaattcaaaaaagatcctgattatctacgagtttttt

SEQ ID NO: 12988 - DNA, 243 bp, Glycine max
  Coding DNA Sequence Number=SeqID_3209
gcccaaaagggaccagtggctttattggggtcagaatccgcacaacaggggcggattgctcccactcctggacctcatccaccacttaaccctacgaggcctaaccgtcacaatcataatcacaccaaaaaacgttgctatctgaaaccctgttttatactcgcattcaaacacggaccaaactttaattctgccattccctacccaccctaacaggctctctggcgcagacaacggccgtga

SEQ ID NO: 12989 - DNA, 547 bp, Glycine max
  misc_feature (442)..(442): n is a, c, g, or t
  Coding DNA Sequence Number=SeqID_3210
agcttttgactcttactttctaaattgctgcatcttatacacaccatgaaatatatctaactgtaattgcatctaagctcgatcacttagattgtttactctatatcaattctcttgacatacacatctcgtgtcaccacctataagaacaaaaacgacttgcaattatagactagatattattaaataaaattacaactgtctctcccctatactatttttttcgttttatataccatatacattttgatttctctcctatatctcttattatttgtattctctctccttcttaccttatcttcaatatctcgtttcttaacagacaagccacatccctttcattctatcttcttttagcttatttctcactatctactttcctccactctctcctgctcatactacaccaattttcttcaatgggtcaaatgtattaatnttgggtgttaaacactctcattcatatctttgtcaaacatattctctgcctatcctattctcttgtgcggggaaactgccctcgtgctttatctcttttttagga

SEQ ID NO: 12990 - DNA, 352 bp, Glycine max
  Coding DNA Sequence Number=SeqID_3211
ggaaaccctctaatttcaggagaagggggcgaaacaaccccccgaaaaaaaaaaaaagtgtggggcatccggggaacccaaaaaaaagaggggccctgtggggggcctaaactttaccccctcccccaagagggggaatctcccccaaagggggcgcgcgcaagaccaaaaaaaaaaaattttttcgtgtccccccccgtggaagaaaggattccggcgccggtgcgcaaaaaatggggggggaaaatagacatgtaggccgcttattccccccacagggatgtcgaaaagcgcccgcgcccccactctactttcccgaggaaaacaacatgggtcataagtagttcacccc

SEQ ID NO: 12991 - DNA, 518 bp, Glycine max
  misc_feature (100)..(100): n is a, c, g, or t
  Coding DNA Sequence Number=SeqID_3212
gacgctgactctgcgcgacgagctagagtaagtagatcataccgagcggcgagcatcagagagagtcgtgtaagtattaggaagagagcagagtgactgncgacgccgcgcgaacgcagcgccaagcgaccaggagcagcgcacactatcaaggagaggtgcgagggtagtaaccacgatgtacgcatacacacactgagtctcagagtacagagagcggcgcgttcagatagtcatatggctacgcgtgcagtgagtatagcgtcagactcaccaaatccgtggatgggtctaggtggcggcgggctaactgagtggggcgaagagtgggcggagagacgtcgcacgtgtcacactctgcctgcgcatcgggccgactcgcggctgaagcgtgttcgtagcgtgagtgtgatggcgagcgcaccacgcgctggatggacgcgacgcagcgtcacgtggacgctccgagtcagtgctatgagcgctgctccgcacacgacgtctgtgcgcatgaagtg

SEQ ID NO: 12992 - DNA, 580 bp, Glycine max
  misc_feature (345)..(345): n is a, c, g, or t
  misc_feature (449)..(449): n is a, c, g, or t
  misc_feature (460)..(460): n is a, c, g, or t
  misc_feature (520)..(520): n is a, c, g, or t
  misc_feature (524)..(524): n is a, c, g, or t
  Coding DNA Sequence Number=SeqID_3213
gttctcttagtgcaacgccttgatcacgctctatgacacgtgtctactccagattctgcgcggacgcgcttctgcgcggcgcctcctctctacctactagaatttattctccctccgcgctacgttagactactcaccactcatttaagctgttctatactctctacaacgcgtatctaggcctcaccgatacacggccaagacatccgctgcgcttgttctcgaccctgctcgatcgaatatgccatcataccacccaagattgaatgagcggcgatagatttatccctgactgaatcgatttctatagaaagcacacacgcacccgcacgctcgaccgtgatngctgatgctagactcggctacgcgcctgatccgcgtgccatgattgattatcaccactccgtacgtacggtacgagtatctactcacgatccactagaacacanttcgcacgaancatcatgtcctatatcttagtccatacacactgtctgctctatgcatgtgtggtctatgntcgnacgagataaagctacctctactgagctcgtcagacccgtaggtctcgtactgtgcc

SEQ ID NO: 12993 - DNA, 136 bp, Glycine max
  Coding DNA Sequence Number=SeqID_3214
tactttgatcattttcatattctcataaaacctagcaaaccttttcttgataactatggcagaggaaaccaagaacgtagttcatgagcaggaggtgccaaaggtaacgaccgaggaatcatcagcggaggtcacg

SEQ ID NO: 12994 - DNA, 489 bp, Glycine max
  misc_feature (228)..(228): n is a, c, g, or t
  Coding DNA Sequence Number=SeqID_3215
gaagcggctattctagttcctggagacatcataagcatcaaactaggagatatcattcctgctgatgctcgtcttcttgagggtgatcctttgaaggttgatcaatccgctttgacaggagagtcacttcctgtaaccaggggtcctggagaagaagttttctctggctcaacttgtaaacaaggtgaaattgaagctgttgtcattgcaactggtgtccacacattnttcggcaaagcagctcacctggtggatagtaccaaccaagttggacatttccagaaagtgcttacagcaattggaaacttctgtatttgttccattgcagttggtatgttggctgagatcatagtcatgtacccaattcagcaccgtaagtacagagatggcatcgacaatcagttggttctaaagtatggaggaagatcgatagccataccaactgccctgtcagtctctaggtcaattggttcgcaaaggctatatcag

SEQ ID NO: 12995 - DNA, 501 bp, Glycine max
  misc_feature (40)..(40): n is a, c, g, or t
  misc_feature (46)..(46): n is a, c, g, or t
  misc_feature (89)..(89): n is a, c, g, or t
  misc_feature (154)..(154): n is a, c, g, or t
  misc_feature (156)..(156): n is a, c, g, or t
  misc_feature (161)..(161): n is a, c, g, or t
  misc_feature (164)..(164): n is a, c, g, or t
  misc_feature (247)..(247): n is a, c, g, or t
  misc_feature (282)..(282): n is a, c, g, or t
  misc_feature (306)..(306): n is a, c, g, or t
  misc_feature (308)..(308): n is a, c, g, or t
  misc_feature (348)..(348): n is a, c, g, or t
  misc_feature (350)..(350): n is a, c, g, or t
  misc_feature (388)..(388): n is a, c, g, or t
  misc_feature (419)..(419): n is a, c, g, or t
  misc_feature (423)..(423): n is a, c, g, or t
  misc_feature (453)..(453): n is a, c, g, or t
  misc_feature (472)..(472): n is a, c, g, or t
  Coding DNA Sequence Number=SeqID_3216
gatatgtgcatctcacgactgactcgatgcagcgcagagncgcgcngacgcgaaccacactacctagtacgagtcgcgcgtacgtcgancataagtgcatggtcacagaccgtcacatagagagcatcgtatatgtaagtcaatggctacgtcncnatcgnctngtcgtgctctctcgttgcttgtactcgctcgactctctcatgttcatgatgtgcaccagacgctcggtctatgtaggtgtatngcgcgcagcacgagtgcctgcatgacaccgatcgncatcacacgcgcgcagtagaccancnatagacagacagtgagacacgcgaactacctaccatctgnantctaattatatgcacgcctcgccactgcgcaggtgatntgtggtgtctcggccagcagagcgactctancggngacgtcgtcatgtagtatgtatcgagactnagcacatatgctccgagcncatcacactcctgcactgtgtctcatatc

SEQ ID NO: 12996 - DNA, 244 bp, Glycine max
  Coding DNA Sequence Number=SeqID_3217
gctcaataggcaaagtaaggctttatattgaatatttatcaaaattaatttaatttccatcccaagaaaattaaaattagtttcaaacatttgatattttctcattcttgttttctttttcccagggatcatcttattcactgcttgatcaggttcttaaacttcaatattattaactttgatataacttttttatcttcatttttggagttaattgatcactactgttatgtttcccactgac

SEQ ID NO: 12997 - DNA, 387 bp, Glycine max
  misc_feature (237)..(237): n is a, c, g, or t
  misc_feature (240)..(241): n is a, c, g, or t
  misc_feature (249)..(250): n is a, c, g, or t
  misc_feature (257)..(258): n is a, c, g, or t
  misc_feature (260)..(260): n is a, c, g, or t
  misc_feature (313)..(313): n is a, c, g, or t
  misc_feature (318)..(318): n is a, c, g, or t
  Coding DNA Sequence Number=SeqID_3218
gaagaagagccacagttcatgcctttattcaggttttcaggttctcccaggggttctttcccggccgtgtaaacgagcgttttcttcgcccagatcagttccgtgtttttgggaggctctttcgacctccgggaactggttcccgtgaaccctttgtagttattccggcgaggaggtaccagttctcgagctgctccgcacagtctccacgtgctttctttctttgtccgggaaatncgnncccgatgnntgggagnncncgccggggggcgtgggcctgggctgcgggaggggaaggtgaatggattgtggnccggntcaggagttgggcttgggcttgggcttttgttgagggaagggcgaagctcattgcggaggccgtggctt

SEQ ID NO: 12998 - DNA, 394 bp, Glycine max
  Coding DNA Sequence Number=SeqID_3219
gtcagcatcctcagcctatcaggaagaggaaaatagaaagaaaaaggaggaactgatgattcagcggtagaaaagaattgctgaaagaagtgctctaagaagactggaactaagacttccttgacttctgcaaagaaagagaatcctaagatacatccatccaacctcgtgcccaagaaattgcaaaaaccagtcatcaggaattccaccattgaacgccttgcaactgcctgatatgaaggtgctgcaagggaaggtggaaaaagaccgatcttttgtggtgtgtttgatgttcatgatcctctaggacacaggttatcatttgtgtttactcaaagtacatgtcatctcataaacctgtgtaaaattgaagtgatgtgcaatttgtgctatt

SEQ ID NO: 12999 - DNA, 583 bp, Glycine max
  misc_feature (26)..(26): n is a, c, g, or t
  misc_feature (63)..(63): n is a, c, g, or t
  misc_feature (236)..(236): n is a, c, g, or t
  misc_feature (291)..(291): n is a, c, g, or t
  misc_feature (556)..(556): n is a, c, g, or t
  misc_feature (558)..(558): n is a, c, g, or t
  Coding DNA Sequence Number=SeqID_3220
attatcatgatacactgcgagctggnataatagagagtaatcatagcatcaatattcatacgntagagcatcgagcactatcgcgcgacgacgtctcttgtgaactaggactgagatatcagcgaggaagagacacaccccagcttaaactgacatgtacgcaccattgcaatcatcgacgacaactaccaacagacatgaaaacatatgacctcacaacaatatatgcgatcacntcatcaaatatgagccactgcacgcgatcttgagcagtcgatggtacaggactcnacgcgtagtaatagaaatcatctagacgtaacatgtgcgagctcatgacacactgagacactacatgagctagcgactgaaataacatattcgcttcgagaacacatgtcagcgacacaatcgagcgtgttgtctgacatctccgcaccactacgatcgatatcgcatcacgacacaagcagacgaacagacaagactctacactatatattactgaacctctcacgcagcggtcgtcgaccacaagtacagtatctatgatctnancgcgacgttatacctctaagactga

SEQ ID NO: 13000 - DNA, 452 bp, Glycine max
  misc_feature (64)..(64): n is a, c, g, or t
  misc_feature (77)..(77): n is a, c, g, or t
  misc_feature (227)..(227): n is a, c, g, or t
  misc_feature (234)..(234): n is a, c, g, or t
  misc_feature (265)..(265): n is a, c, g, or t
  misc_feature (314)..(314): n is a, c, g, or t
  misc_feature (331)..(331): n is a, c, g, or t
  misc_feature (337)..(337): n is a, c, g, or t
  misc_feature (344)..(344): n is a, c, g, or t
  misc_feature (351)..(351): n is a, c, g, or t
  misc_feature (356)..(356): n is a, c, g, or t
  misc_feature (375)..(375): n is a, c, g, or t
  misc_feature (417)..(417): n is a, c, g, or t
  Coding DNA Sequence Number=SeqID_3221
gacgattcgagatgttgtactagattctatagtattcattcgatatctattcttcagctatatnttatttatgtganatttatctcacacaacaaattggaagaggaaggggatacagacatatacatactatcagtatatacaacagattagcgtactaacacaacattgtcactcaatactatatatacaatgaattcagacgtcataggcgtagccggattagnagcgatnacgagatagtgagagatgcagagagagaagnatgaatatacatatatagatacaagatagggttatagatctttttatantatttatgtatatatanattttnagatagnggtgatngttanaatgctacacatcatctcnatttttttttattataatgtatttttttcgtgttgtgtgctncgcaacgcacaccattacgcctctgcattgtagta

SEQ ID NO: 13001 - DNA, 568 bp, Glycine max
  misc_feature (42)..(42): n is a, c, g, or t
  misc_feature (72)..(72): n is a, c, g, or t
  misc_feature (127)..(127): n is a, c, g, or t
  misc_feature (393)..(393): n is a, c, g, or t
  misc_feature (397)..(397): n is a, c, g, or t
  misc_feature (464)..(464): n is a, c, g, or t
  misc_feature (488)..(488): n is a, c, g, or t
  misc_feature (505)..(505): n is a, c, g, or t
  misc_feature (528)..(528): n is a, c, g, or t
  Coding DNA Sequence Number=SeqID_3222
gtgttctttgtcttatgtttgtggggtttcttacttctaagnaggaggtggagtattagaaaatatttaagntataattagattatcttagaacatctttcttgatctgtttatttgtattagtagntctattctttattcctgaatgctgatgtgatacctgaccaattagtatatatgagtagtaaattgagatatccgcaacacatctaacagtgatattttcctgattattatatctgtttccccattgtccatgattaattaatccatgttttttcctccatattaaaataatgacttattttccaggttccagggatgcatctcaccttacatgtccagcaaatactttgactttgacttccaactagttatccatgttgtttggcnaganaacccattatagtaacatattaacagggtaatacccccatccccctccacgggttaaaacctccgtncccatggaaggacatatattgtanttacatatgcccccaancatttttttttcccccggtcccngaaaccaatttggtttccggttattatatccgttaccata

SEQ ID NO: 13002 - DNA, 292 bp, Glycine max
  misc_feature (38)..(38): n is a, c, g, or t
  misc_feature (74)..(74): n is a, c, g, or t
  Coding DNA Sequence Number=SeqID_3223
gaggttactcctcataaaaagaaagactctaagattanatatgctcaacttataatctcaaaggtacatactantcctaaagaaatcaaatagcatcccagatttttagagcttaagaaaatgcatggaattcaaaataaaagaccttcaattaaatctactatcccacggacaatcatctcaatattattatcaatgactctgaattatgttagaccatccatatgtgaaaagccatgattgacaaaggaactaccaccaacaactaccaggaaatatcagtactactcta

SEQ ID NO: 13003 - DNA, 413 bp, Glycine max
  Coding DNA Sequence Number=SeqID_3224
agcctttgaggagacgggaatgttaggtcacgaccgcgcaaacctgaggcatgagccgtgtgaggcaggtccattatggcacttgtcagaacagagtttttgttttatgtgtttatgaggtgggggaccagcccttcttcctctagctaactccattcacacgccagagaatagaggtcccttgaacaattttcacaaataaccataaatatcttgctatgtatttcagcttcaagttacggtgctagctagagagtttaaactttaaaccaaaaaggggagagaacaaaaacccttattagaaagcatcattgttcattactgtccacccggtcaaccattttgcatatgatagttttttgtcaactaagagagatgagattgagaagagagagactacactagtacgctaa

SEQ ID NO: 13004 - DNA, 546 bp, Glycine max
  Coding DNA Sequence Number=SeqID_3225
tgttgcttctatgcttctcaatcttcttcactttcagtctccaggcaaatgagctaacatccccctcctctaaagaagaaggagaggtgagaatggtgccattaatggaggagaagtttatggtaatgaatgaaacaagaaggaagcttgggagtttccagatatgttcagtttgcacttgttgtggaggtgcaaaaggagtttgcctgcctttgccttgttgcttcgcaattaactgcaatatcccaaataaaccctttggttattgctccttcactcccaaatcctgcaattgctttggttgccatagctgagatctttccttttgggcagaggaagaataaaccagcatcttgatttcatatgcaaagtgtgaaagggaagaaaaaacaaaggaatatgtgttcttggtttggttctttatttttattttttttgtttataattttattttcagtcttctttaaatttcattgcctactatcttcagcaacatcatcatcctcattaattaattaattatctttttgcattgccattctgata

SEQ ID NO: 13005 - DNA, 536 bp, Glycine max
  misc_feature (246)..(246): n is a, c, g, or t
  misc_feature (275)..(275): n is a, c, g, or t
  misc_feature (294)..(294): n is a, c, g, or t
  misc_feature (369)..(369): n is a, c, g, or t
  misc_feature (479)..(479): n is a, c, g, or t
  misc_feature (497)..(497): n is a, c, g, or t
  Coding DNA Sequence Number=SeqID_3226
gtgcacagtgtagcgcgtgttagatgttagagttatcatatgagaagtgctagtcgctctagcatgatacgatcgtagttacgtatacaagatatgagtatatctgctcggagtgtgttctgagatgatcgagtatgaatgtatgtatttgtggtatgcaggaatgtccacgtatagaaatgatagctcggtgttctggatatgtagtcgattgtgcactaatgaagcgctcggaacacactacgncatcatattatactagatgtacgtgaganggagtgtgggagacgacanggcggagtgtcgtctgaatgtacgtccgagatatcgaacaggcgagcacgcagtgtcgacgatatcaaataaagntgtatgcagggatagagagagcagtacgtatcggtgattgtcgagcgtaaggcgagcagtacagacagtgacttgtagctgacataacatgtgttattacgtagttacancgtcctgatcccttcgtnatgccttgtgaataacagcggatactacacgacattcgg

SEQ ID NO: 13006 - DNA, 475 bp, Glycine max
  Coding DNA Sequence Number=SeqID_3227
aggtgtttcgaagaactagagagctagtactcaatcccatctttgtggaatcccagtttcaccgatgtctaggagacgatggattatcagtacattaaagttcagtacatgcagaaagtaatgggtgggtagtattataaggacatcaccagagaatggaaaccaccatccagaaatctcataaactacggacgtcatcattgtcggtgctgatgttgctggcgcagcccatgctcacacacttggccctgaaggtagaacaaaccttttcttgacacgactttgtgaaatctaatccatatgtgtgatgttttttcttagttactacctgcaaatatgttttgattcatagatatatgcaaaacttatgttgaggtaaaataataacaataacaattatgttagaaagtcatgtttgattgccagaaagtagaggttggaagatagaagagtagttttctaagtgttattctga

SEQ ID NO: 13007 - DNA, 376 bp, Glycine max
  misc_feature (168)..(168): n is a, c, g, or t
  misc_feature (253)..(253): n is a, c, g, or t
  misc_feature (310)..(310): n is a, c, g, or t
  Coding DNA Sequence Number=SeqID_3228
ggtggacaagataaaatcagaccattatggaggcattatttccaaaatacacaaggtttaatctttgtaattgattcaaacgatagagagagaatcggtgaagctcgtgaagaattgatgagaatgttaggtgaagatgagcttagagatgctattctattgatcttngctaacaaacaagatttgccgaatgctatgaactgtgcagaaattactgataaattaggtttacattcattaagaagcagaaatnggtacatacaagcaacatgtgctacttcaggtgatggtttatacgagggactagatnggttatctttacaattgaaaagtctaaagagttaagtttaggaattcaattgagtgtttttagaga

SEQ ID NO: 13008 - DNA, 143 bp, Glycine max
  Coding DNA Sequence Number=SeqID_3229
ggatgggcatctagcccagtggcaagagcacggctgtgtgccttggcagacccgagttcgaaacctgtgggcggaatttattttaccgaagtaaaactcggtgtctcacaccttcccttctttaataataatgccgcggggct

SEQ ID NO: 13009 - DNA, 376 bp, Glycine max
  Coding DNA Sequence Number=SeqID_3230
tgggtcgttctggaaaccctcgccgccacccctcttcgggcagaagcaccgctatcccttctcctctagtgcttgcggcggcgctcgtcctgtccgggcgccgacggttgaaaggaggaggatggtatggagttcctgctttacgccattgacagagttcaccgacagccttgatcaccagattaggttcccctcgtgttcttatcgggcaacggagctgcccctgcagttcctgctgactctaatgctgggtctggttgcgctgaaaaggtcggggacgatggcgcaggtagagcgcgtgaaggagtgtgccgtcgctgggacgcatctccgacaagatcggcgcagtcgactcgcagagtcaatccagaagcac

SEQ ID NO: 13010 - DNA, 579 bp, Glycine max
  misc_feature (43)..(43): n is a, c, g, or t
  misc_feature (48)..(48): n is a, c, g, or t
  misc_feature (66)..(66): n is a, c, g, or t
  misc_feature (131)..(131): n is a, c, g, or t
  misc_feature (296)..(296): n is a, c, g, or t
  misc_feature (300)..(300): n is a, c, g, or t
  misc_feature (302)..(302): n is a, c, g, or t
  misc_feature (310)..(310): n is a, c, g, or t
  misc_feature (316)..(316): n is a, c, g, or t
  misc_feature (342)..(342): n is a, c, g, or t
  misc_feature (375)..(375): n is a, c, g, or t
  misc_feature (463)..(463): n is a, c, g, or t
  misc_feature (481)..(481): n is a, c, g, or t
  misc_feature (534)..(534): n is a, c, g, or t
  Coding DNA Sequence Number=SeqID_3231
atgagatgcgcctgtatctgctgacgtgtccgtgcatagctgnattancgtcatatgtactggccnctacaccgtgatatactgacttgatctctgcgcgtatctctcgtgtatgtgttctattgtatagngtgtaccactaccatgtgaccacgatatgtaatgtagtaatacgtaaagaagaagtcgcaccatgcttactacgtaacatcactactgcatattgtcgtctacttatcactcgctgagatgatagagtctcgtcctcacacggcgagtcagtctagttagttaangagntngctcacanagtacngtgctccatatatcagctgtactgtngctttcacagactgtcttcctgctcatgtcgancactactgaatatatcgactgtagtgtgatgatgatcgtactgtgtcgatgatgcactgcacgtctcgtgcgaggtatgtgtgtatanagtatgatgacgatgttntgacgtcgacacttcgatgcgtgagctgagtcgctctcgtgctgcactgtatntcaggcgcgtctcagcatttatttgcagtgcgacacatgacgcgt

SEQ ID NO: 13011 - DNA, 389 bp, Glycine max
  Coding DNA Sequence Number=SeqID_3232
gaaaggtggcgctatttgggatttagacaacttacagttattgtgtgaggattgtcataaggcgaaaaccgcaaaagaataataaactattttcccaaaaatctattttccgcgcccctttccaaattggaacgccaatttcgcgggggcgcacgtagagggaggcagacggattctaacgaatgggtttattctaatttactcaatggcggtaaattcgttaacggttccaccactccgggcggttattcgtcttatcagatgaatacaattgaaggaaataacccggcgtctttggttggtgatgccaccttagacaaattgattaaaatgttcgacgcgaaattagcagatgataaataatcaattgattagctatcgtgattatc

SEQ ID NO: 13012 - DNA, 234 bp, Glycine max
  Coding DNA Sequence Number=SeqID_3233
gtccttacccacgaaagaaacatgtacgtcttgatgcatgaagttacccacggtctcggattcagcagcagtctctactcttatttccttgatagcaacggaaacaagagatcaggacatatcaagtctgttaaggtcaacggaaagacccgttccttcattgatgttgagcctcttacctcaaagctcagaaaccactacggatgctcatctcttcaaggtgcccttatggaa

SEQ ID NO: 13013 - DNA, 269 bp, Glycine max
  Coding DNA Sequence Number=SeqID_3234
tgtccccaaccccaggtgtcccttgtcctgccaacccaccccctcccagcgccctccccccgtaagacccaccacccttacctctccccccaagtcccatcactcaattcccaccttgcaccgcccagcccaccattttccggctcccagcccacaccaccaaagccaaagacctgctccctccccttggcgcccccccttggctcccaacgctaccgtacctcagcgtcctcccccctgcggaagcaaacccacagagccctggcccc

SEQ ID NO: 13014 - DNA, 390 bp, Glycine max
  Coding DNA Sequence Number=SeqID_3235
taaaccgttcgtgcccgatttcatattgttcttactacaagttcattccattgggaggtggtctcaggtcctggcccgggatggtctttctgctctactcgctcgagttgacggtggcgcacctccttcactgcttcacgtgggaattgccagattggatgaagccaattgagatggacatgggtgacatgttctgactcaccgttccaagatccacgcgactcattgctattccaaccaagcgcgtggtgtgcccattcttttaaaaaaacaacaacatgaatcttttttcttcctttttttaggatattctttttatcccttaattatacataatcatattaaaataattttatgggttaaaaggcagcttcacaatattaatttcag

SEQ ID NO: 13015 - DNA, 500 bp, Glycine max
  Coding DNA Sequence Number=SeqID_3236
atatacggctccttgttaatccttgcagcctgctttttctttgcatcaatttggtatcttttcagactaaaaaccgattctgaattatttatgactatgttgttccgtgttagccaaaaagaagctgaacagataaaatctctacttaataattttttagcttctctcgattcaagcgttgatcaaattcagatctctgaagaaaatcgagaggtaactgatgctgctaaacttcaacataaaagtacactcagttttcataaagcctctacgaagaagctgtttactgctcaaatccttttgcttgcgcgcctctgtccttactatttacttttaattgtctggaacactatatatttctatatatctttccaaagcttaacgaagattcaattggaacaacaacaaattcaagcaagcttgagcggccttgtggaagggagtatgatggtgaatgagctaattgagcttgttttagcgaactcaaccacaactatagg

SEQ ID NO: 13016 - DNA, 563 bp, Glycine max
  misc_feature (40)..(40): n is a, c, g, or t
  misc_feature (303)..(303): n is a, c, g, or t
  misc_feature (402)..(402): n is a, c, g, or t
  misc_feature (521)..(521): n is a, c, g, or t
  Coding DNA Sequence Number=SeqID_3237
gatcaacctatcatatcaccagcacacaccgtcgtataanagcttctacacttaactatatgttaatgccgacgtgagatatagcgcgcgcgttcatccgcacctctcacatctcaccctctcttcgcttcactgcgcgcgatactctcttaatatgttgaatacgatatgagatacgagtctccacttcatcatcaattatattatatctctgcatctcggtgcctctatctatactagtcacgtatagcaccgctcttatcacttcgatactcgattcagcgataaactacaacaccatcncatatagatctcgtcaacatgcatcaaacacatactcatgcgcaacaacaagacatagaatagagagaactcaacacatgatcgacagctcaaacaaangctactctacgatatctaattatgtattggtctctagtgtgacttccaacctatacatactctctatctacatgagatactacatatagaccaatatgctctccctctctattcgtccnctcacaacacgagctccgaacattcttattcacctactcgta

SEQ ID NO: 13017 - DNA, 551 bp, Glycine max
  misc_feature (29)..(29): n is a, c, g, or t
  misc_feature (298)..(298): n is a, c, g, or t
  misc_feature (441)..(441): n is a, c, g, or t
  Coding DNA Sequence Number=SeqID_3238
gatccgtagtgcacgttagacgtagtcanagagacagatattacaatatatacataggtagcagatagttgtgtgtacgacgcgtccgaaactcggacagacatacaggcgcgggggcggtgcgggaggacggtgagacgcgaaggtgacagagcagctcctgtacgcgcaggcggcgctcgcgccgcggcgggctggccggcgcggtgcgcgccagctagctgagagccaggccgacgcgcgcgacgggctccgcgtcttcacgcgccatacgatatcgcgtgtcctccattcgagnttgtaacagcagtgatgtttactagcatgtgacgcgtgcgcgttgcctagacctggcctgtcgtatacgagaatcatacgacgcgctacgggggcgtactagtgaggtccacgctagttagactcgtatgagcatacacggcnatatatttactaatattttataataaagcacacgcagctatataatcacactccgctagggctgttatatatatagtctatatatattaataacacatccttactctcgc

SEQ ID NO: 13018 - DNA, 383 bp, Glycine max
  Coding DNA Sequence Number=SeqID_3239
ttccttttggaacttatgcttacagacatataactattggtttgtgtaatgcaccagccacattttaaagatgcatgactgccatattcatgggctttgttgaacaaattaccgagttcttcatggacattttttccatttatgggacatctttcgataattgtctatgcaatctcgataaagtttgcagtggtgtgaagaacgcaacctagtcttgaatgggagaagtgccacttcatggtgaatgaatgtattgttcttcgacatagaatctctgaaaggggtactaaagttgatagaactaatatagaggctatagagaaactaccttctcctagagatataagaggtgtaagaagctttctcaggtatgctagttttca

SEQ ID NO: 13019 - DNA, 326 bp, Glycine max
  Coding DNA Sequence Number=SeqID_3240
tatcttcgtacgcttcctcctcaaattcgcttttaattgttttcactgagtcaatggcgggtcgtggtaaaactctcggatctggtgttgccaagaaggcgacgtcgagaagcagcaaggccggtctccagttccccgtcggtcgtatcgcccggttcctgaaaaacggcaagtacgccgaacgcgtcggcgccggagctccggtttacctcgccgccgttctcgagtacctcgccgcggaggttctcgaattggctggaaacgcggcgagggacaacaagaagacgagaatcgtgccacgtcatatccagttggcggtgaggaac

SEQ ID NO: 13020 - DNA, 479 bp, Glycine max
  Coding DNA Sequence Number=SeqID_3241
gcggtgctggtggtaactacagatatagttgcagtcaacccgggaacgggcatcatgtttatcttgttgggagaaggtgcaccatgtacgtcgttggatatgataggaacggtcacgagctggttaacgctaatggagcgtacctgtgcgagacgccctcgcccgtggggatgacagtgtggactgcacctgagggagatgggatagctaaactagttgcttgtggtgtccggggtgccgtggtagtagtactagtggaaatcggtaggactgatgtaattgatgttgacgtggaaggaaaagagtgtctggaaggtgggacagggcgggttgcttgttggggaaggagggtgaggggctggcgtcggtggctcttttgggggtggttgggtggcggttgggtagtggtgcataggggggaaagaggagatgtagtgatagaatgagggggatcgggtgtgctgggacggtatgcgact

SEQ ID NO: 13021 - DNA, 600 bp, Glycine max
  misc_feature (27)..(27): n is a, c, g, or t
  misc_feature (105)..(105): n is a, c, g, or t
  misc_feature (161)..(161): n is a, c, g, or t
  misc_feature (236)..(236): n is a, c, g, or t
  misc_feature (262)..(262): n is a, c, g, or t
  misc_feature (312)..(312): n is a, c, g, or t
  misc_feature (322)..(322): n is a, c, g, or t
  misc_feature (336)..(336): n is a, c, g, or t
  misc_feature (354)..(354): n is a, c, g, or t
  misc_feature (387)..(387): n is a, c, g, or t
  misc_feature (389)..(389): n is a, c, g, or t
  misc_feature (426)..(426): n is a, c, g, or t
  misc_feature (505)..(505): n is a, c, g, or t
  Coding DNA Sequence Number=SeqID_3242
atctttccacctatcttctctttattnatcataccgcgtgcacgcggacaacttataacgccgcaatatcgtatattgatgtaatagatataataagtatatagngtctgacttggagtcgaaccaaacctatttacatttatgtcattgtgctcaattcngcacactacactacaactatcttgataatgttatacaaattacatcgacacttatcatctctatcatattctggncgacatagacaaagcgtctactaatntacaatataacacaaacatcttcatctataatgctcatatatcacagtcnacatactacnatctctataagtgnatatatatatatgccccntaatcacacaccattatcatcattataccatcntncacattcacacttcgacgcggcgcacgtgttgatctnatatctatattgatcgtgatactgcgtggatgttgcgccgacgcgacacatataacacagcacgatatatgagacattngaacaacacatgagagagcacatcaagaccatcatgagtaataagatatattacacaagagtgagcgctcgatgaacgcaccaacaacactcgtg

SEQ ID NO: 13022 - DNA, 513 bp, Glycine max
  misc_feature (131)..(131): n is a, c, g, or t
  misc_feature (238)..(238): n is a, c, g, or t
  misc_feature (293)..(293): n is a, c, g, or t
  misc_feature (295)..(296): n is a, c, g, or t
  misc_feature (326)..(327): n is a, c, g, or t
  misc_feature (365)..(365): n is a, c, g, or t
  misc_feature (376)..(376): n is a, c, g, or t
  misc_feature (411)..(411): n is a, c, g, or t
  misc_feature (428)..(428): n is a, c, g, or t
  misc_feature (455)..(455): n is a, c, g, or t
  Coding DNA Sequence Number=SeqID_3243
gcacattctcgcatctattgtcatgcatcgctgtcgttacaagagtgtttgcgtcgttcgtgttctgtcggtgcgcagtccgatcgtgggcggcacgcggggcgtgtggttgtgcgggtgtgctttcgtcncgttggggcagcgcattctggatactatatagtgtgcatgtagtgctctatacgcttattactctaacactatcgtagccttcttgttatgcaattaatagctctancttctctctcggttcggtgctattgttgtcggcgctacggtgtgtgtctgattcngnntcgactgacgaggctagacgattgagttcnnctcgcgcgtcgcgcgcaggtcgttctctcgccactcangcctctctcgntcgtggctctctctgtcctctagtatgttctcatnataggatgtcgcgtgcnctctgtcctcttcactgttcttgtganggtgatttttattgccgatcgttttgtctcgtgcatagctgtgtgacttgcgtgtgtt

SEQ ID NO: 13023 - DNA, 555 bp, Glycine max
  misc_feature (80)..(80): n is a, c, g, or t
  misc_feature (247)..(247): n is a, c, g, or t
  misc_feature (249)..(249): n is a, c, g, or t
  misc_feature (346)..(346): n is a, c, g, or t
  misc_feature (353)..(353): n is a, c, g, or t
  misc_feature (401)..(401): n is a, c, g, or t
  misc_feature (422)..(422): n is a, c, g, or t
  misc_feature (471)..(471): n is a, c, g, or t
  misc_feature (473)..(473): n is a, c, g, or t
  misc_feature (507)..(507): n is a, c, g, or t
  misc_feature (514)..(514): n is a, c, g, or t
  Coding DNA Sequence Number=SeqID_3244
tgttcatctgtgctgtgcagcgcagtgctgatgtcgcgaggcgcgtggtggtgaagtgacagtgctctcttctgcatcancgaagtaggaggctgacggatggcgctcatgatgctatcgtcttgagcggttgccgtggcagaagtgtatgtgtaatcacatttactgcgagcctgtgccccgccgtaagtcgtatgttatgatatcgcagcgcggaggagtacatgtgtatgagcgacataggacntnggtggcagctgagagcagagggtagtgcacatgaactggtagccgtgcggtggtttgtgtttagcgtggactgtcgcagctgtctacgctctgtgtngatgtangttcgtgatcgcgtagaagcaacgtgagacgggtaggacatgagcggnagcgggcggtgtcgggccggnagaagtctctaagcgctagcgatcgctcgacgatgagagatgctgagcntncgagacaagaggagaacgacggcgacgtgaatgngtgactngtgtgaccgtgagtatggaggtcacagcttattgttcgaga

SEQ ID NO: 13024 - DNA, 408 bp, Glycine max
  misc_feature (284)..(284): n is a, c, g, or t
  Coding DNA Sequence Number=SeqID_3245
tgggtatcttcagctaacactccttgatgctatgctacaatacaaaattccgccatgctatgcacaaaaatagggttgagaaatctccatatagaacatgggtggagtaacccgctaaatatcaggtctactgctcatctgcttgagctttgaatagaatttcaatcatgatctattgttgccccacccactgcacgaacatcaaatcgccgggcccgagattattagctcttgccaccgctttgctgtcttcgatgattccagtttctaggttacgggcatanatgtcgacgtttttgctgagttgatttgcgaccgcaatcaacgatccattctggttcatactgaagtggcgagggtaccatccccctgattttgcaagctggacaaacgatagcttcccgtcgg

SEQ ID NO: 13025 - DNA, 585 bp, Glycine max
  Coding DNA Sequence Number=SeqID_3246
tgactcttattacttcgtccacgtatggaggaataggatgatgaatgttgtttatgtagcttttatgctgtgtgtattagttattgggtctctcagtcgacgcgtatcgcttctgcaaactctgtacagatacactcttgacgccgtagtgcgtcgtgccgaacatatccgcgataggatcattaacatatacgtctatcgaatgtatagacatcatttaactaggctggaacagatacataacacaaccactatatgcatagatgtgatcacaagatgtaacgtgcgatactatagtgttgcctaatgctagattcagcagtgtaccgagccgacagccagactgcatgatacacgatcatactaatatatagacgaacatgatccagatgtgagcggagcggatgactagataattagtaacataagctagctgttgatggctacggctatcgatctcagacaaacaatcagaggaggaggaggtgggagatgtgccagcattgaaccactgacatgcgtatgagtggtaatcgctggtatctcgactctcttttcatcttacgtttatgtgagtctgctgac

SEQ ID NO: 13026 - DNA, 403 bp, Glycine max
  Coding DNA Sequence Number=SeqID_3247
acctaggttggtgtgacaatgtcacagatgagggggttaccagcttggcatcaggttgccctgatctcagggccctggatttgtgtggctgtgttcttataacagacgagagtgttattgctctagcaagcgggtgcccgtacctgcgatctttgggcctgtactactgccagaacatcaccgaccgtgccatgtactccctcgcaaacagctgcgtgaagagcaaacgagggaggtggggcaccccgcggagcagcagcagcagctcgaaggacgtcgatgggctggcaaacctgaacatcagccagtgcacggccctgacgccccccgcggttcaggcggtgtgcgactccttcccgtcgctccacacctgcccggagaggcactccctcatcatcagcgg

SEQ ID NO: 13027 - DNA, 424 bp, Glycine max
  Coding DNA Sequence Number=SeqID_3248
gtgactctatctctgatggttgcaaatactactctcctaatgaagactatgactgcgagaaccctgatggtgaagattatgccagactcccaagcgctgaagtttatggaagaagtgctggaagcaagtgtttcactggtactttgaatactagatcatcaaacagtgcgacttcattctgtttcagatactcatgtagcggaagcggatcaaacactcaagtgcaagttcaaatcggaagcaagtccgtcacttgtactgatgaaggaaccaagactgttgatggatactatggtactatcaactgtcccgatcctttgaccttctgtaacactgttggcaagaaatactgccccagaaactgtatgggaagaggtacctgctcaaatggtacctgcagatgtaactcaggattttcaggtgt

SEQ ID NO: 13028 - DNA, 309 bp, Glycine max
  Coding DNA Sequence Number=SeqID_3249
ggacgacacgtacatcaagcaatttgtctgtgtttggcttgttgactcgagtctcgcctccggtgctttcatgtcctcaaagcccacatgcatgccacatgttggttgatttggcatgtgtgcgcaactggagtgcgttcacattagattggcagattggcagtccaccggccggcctgcctagtatatattagagatgggttctgcagactgcagtctctagctactgttaatttgcatgtttacttccatgtagtttctcttgtttgttgctgttatttggtcattttgtaaattggtagcagcgcc

SEQ ID NO: 13029 - DNA, 553 bp, Glycine max
  misc_feature (40)..(40): n is a, c, g, or t
  misc_feature (59)..(59): n is a, c, g, or t
  misc_feature (318)..(318): n is a, c, g, or t
  misc_feature (320)..(320): n is a, c, g, or t
  Coding DNA Sequence Number=SeqID_3250
gacgggtcgtcgatatcaatacgtagtcgatgtaacgagnacataacaatgtttcggtncgtgacttaattactccagcaatctacaacttgtgtgtagacggccgcgcgtttctgttgagtacgccatccccacatgacaataagataaacgtatatagtgtgtgcatgccgaacatatagtgcgcgccgcggtctgacacgagttaacgagtaataacatgctgtacatacaaacgcgtattttccggataaggggcgcggggctgtgtggcagaggaagtccaccaacgggtctacgctcgcacgatatcttcananaataccgggcgcgtcgtgcgcgtgccttaactagatatagactccaatatatttatgtggacgtccttacatcacttacatcacgtctcatcgccgaccgcgttcatcgagagtaatggttgtgtgggtcctgcagactcgcgcgccgtactcaccgaagggcggaaggagacacacggctttataatatatatatgtcaataagattgattgtgttgtagtctacctgcccg

SEQ ID NO: 13030 - DNA, 456 bp, Glycine max
  misc_feature (27)..(27): n is a, c, g, or t
  misc_feature (81)..(81): n is a, c, g, or t
  misc_feature (86)..(86): n is a, c, g, or t
  misc_feature (94)..(94): n is a, c, g, or t
  misc_feature (127)..(127): n is a, c, g, or t
  misc_feature (211)..(211): n is a, c, g, or t
  misc_feature (214)..(214): n is a, c, g, or t
  misc_feature (224)..(224): n is a, c, g, or t
  misc_feature (267)..(268): n is a, c, g, or t
  misc_feature (272)..(273): n is a, c, g, or t
  misc_feature (295)..(295): n is a, c, g, or t
  misc_feature (301)..(301): n is a, c, g, or t
  misc_feature (309)..(309): n is a, c, g, or t
  misc_feature (343)..(345): n is a, c, g, or t
  misc_feature (364)..(364): n is a, c, g, or t
  misc_feature (409)..(409): n is a, c, g, or t
  misc_feature (416)..(416): n is a, c, g, or t
  misc_feature (422)..(422): n is a, c, g, or t
  misc_feature (425)..(425): n is a, c, g, or t
  Coding DNA Sequence Number=SeqID_3251
cgactccgacaatctaatacgcacacncacacccgctcgacccactccgctatcacagacgctcgaccacaacgcacaatntttanattcttcnccatatatttatcgttatgatgtctcatactanaagtcatcttagatcgtgtatgctatatgtcatctggcgcagcatcccgagcacatatcgatgagttcacacacctccgctcanatntattcttgtntttcttgttctactccacccagcagctcgccctgcacaccccnnaccnnctgtacatgcggagcggataancgtganatacaccnccagcagccgcacatctcaccacacgggtaggcnnnagagtcgaaatagtatatntgcacattctgagtcgtagtatgtcatcatgttactatattagtnttacaantgtgtnttnttttttctgtgtgtgtgtgctagcggtggcg

SEQ ID NO: 13031 - DNA, 507 bp, Glycine max
  Coding DNA Sequence Number=SeqID_3252
gcttacacgtgtagaatttctcaatttaatttttttaaagataaaataatatatttttaatttctatacttttgttgttgaatcttatttttagtatcttgatatcgtaaaaattaattcctaaattttataatatatatatatatatatatatatatatatatatatatatatatatatatataatccctccttaattacagcctgaagttgaaaaacatgcacaactttataaacttacatattttatcctttatttatgattttattaattctagctgagtgtgaagacattagacaccttcatatatgacaagttattttctcagctggtgccagaagaaaaggaaaaaggaaaaccgtttttcaaatattctgcttatcattttttactttctttacatgtacctacttttcatgaaaatagtggatgccattaaatattctaactaatctgtgaattgaacattctgctgaccattttttcagctttccaagaaccacatt

SEQ ID NO: 13032 - DNA, 407 bp, Glycine max
  Coding DNA Sequence Number=SeqID_3253
tccaatctcttcttcaagttctctgccgatggccgcctccgccgtcgccagatcgatacttcgagctgcttcgtctcggggagccgccgctggttccactggccgcttcgcgtctcaagcgaaatcagttccgccgatgtttagagccagcgctaaaagaagctcactgctttcgcctctccgaaatcctgtggagatgagcttctgtgttgagtcaatgttaccataccacaccgccacagcttctgctctaatgacttcgatgctttctatctctggacatacctatggctggctctctgacgcttgcattgatgatgtgtgatgagtttgccagaagatcactgaagctaccagtttatgtacaaacctctacctttatttaggatctagagccctcttgattt

SEQ ID NO: 13033 - DNA, 394 bp, Glycine max
  Coding DNA Sequence Number=SeqID_3254
gccatcggacgttcggaactcggaacctcaagaactacggccccggatccagggtttgccgtgtctgcggcaactcgcatggcctgatccgcaagtaccgggtgatgggctgcagggcgggcttccgcagcaacgccaaagacacagggtccttcacgtacccttataaatgtaaaaatcaaaagaagaaaggacgcgaggattatcaaagaactgtggtgctttatcgcggctgagatttttatcataagctatgtaatggactactataatgtttttatcctggtgacaaaaccatgaaaccatgtaagcgactgctgtttgtgcatgtgagagcaattgtaatgttactttctgttactcttgttacattctggatataaatctgcattgt

SEQ ID NO: 13034 - DNA, 400 bp, Glycine max
  misc_feature (102)..(102): n is a, c, g, or t
  misc_feature (218)..(218): n is a, c, g, or t
  misc_feature (230)..(230): n is a, c, g, or t
  misc_feature (258)..(258): n is a, c, g, or t
  misc_feature (260)..(262): n is a, c, g, or t
  misc_feature (297)..(297): n is a, c, g, or t
  misc_feature (318)..(318): n is a, c, g, or t
  misc_feature (334)..(334): n is a, c, g, or t
  Coding DNA Sequence Number=SeqID_3255
tacaccgtatgtacagtagtactcttctacttggaattgaatagccggatacttgtatatattcagcgacttcatctcaacctcaggacatatttcgaatanactctctgtacatcacttcttatattaatgagatcgatgagatggtataagctactgacccatatgaccgtatcttcaccgttcgcagtctcatatgctccccggcacgtgtcagnggccgtgctatntgcgtgtcccgacggtatcgtgttatantnnngttgttgatatgtgtgttgattactgttatacctnatctatcctgtgaacactctnagtgacacgtgagtgngtaatacagtagttaaatatttatatattacgcgggacaacgagcaacatccaagatacagcgtta

SEQ ID NO: 13035 - DNA, 500 bp, Glycine max
  Coding DNA Sequence Number=SeqID_3256
ccagcgacttcacggtctttaagttgattgtgagtaagcgcccgtcctttaggctttatgacgggtaactaccttgtagtcccccggcacgcacttgtagcgctcgatatgccaagcgtctgagtgatagattggatgctcttccttccacttggccaatcgtcactgacgacagctagctttctcgtgagcgacgatgccgtcgctcaatgcgcattccccgctcacgcggttccaaggtgggcggggagctttttcgcgttggagcgtcggatgagagcatatcgtcatttgccgccgccgaaatataccagtggcaacaggcaggcagccctcctgacttgtccgcagtgttgcaagaccatgacgccccgcgagaagttgtatgtctgtcaattgtgcaggcagtttgttattgtcttcgccgtaactgaatcgaggtcgttctctatttctttaagccagcgaactgagagattcagcttcacaaaaacgccgcc

SEQ ID NO: 13036 - DNA, 550 bp, Glycine max
  misc_feature (38)..(38): n is a, c, g, or t
  misc_feature (210)..(210): n is a, c, g, or t
  misc_feature (401)..(401): n is a, c, g, or t
  misc_feature (525)..(525): n is a, c, g, or t
  Coding DNA Sequence Number=SeqID_3257
tcggtgcatatagtgtcgtcggtcacctgtgtgtgccnacaatgtgttggtgtgtggcgtggtggctacgccatcttatagatgtgaacgctgccactcttctttgctctcggctcgcgctctcgtacttctggcgcggagccgtctcgctgtctgtgatgtaattgtgttgtgtgggctccttctcctctcatcaccttcctctccgtnctcgctctatatgtgtggctacaatctgctgtagccgcctctacttctgtgagtgcgatgcgtgttgtgctgtgcctctctcgcgtgttgtgcgctgtgcactgtcttgtgtttctgtcatactttctcgctctcctgctgttgtcgtgatcgcgtctgctcctagacttctctatcgcgcccaccgaccnctaatacatgactaccaccgagcatctctgcatcttactatagctgctccctatcatctctacatatcgtatgtgtggatacatctattcattggttgtgctcgacacatgatgtgtgcgtgcnagcatgtgcgtgtatactctccact

SEQ ID NO: 13037 - DNA, 531 bp, Glycine max
  misc_feature (345)..(345): n is a, c, g, or t
  Coding DNA Sequence Number=SeqID_3258
taaactatacacaaactccacatcaaggattggccgggggacctttttttttgtgttcccctccacacatcgtttgtattaaaaattaaatttaagaattggccaggtacgagtctaaaaacactttcgagcccttcatgtgtgaagctgggtaacaatcccctcagacagataccttcggatggctttgaagtggggcctaaacttcagatcctggatctaaggggtaatgcagcttcattactagatggacctgcattttctagtttgccatacctgcaagagctttacctaaagaaaatgaagctcagtaaagtcccatcagatatagtggggctacaacanctacagatccttaacttaagtcagaattcccttcaatcaattccagtaaagttaaaagatctcacttctctcaaagaactcgacctatctaataacaacatctcagtccttctacccaaactaagtttactaaagcccaacctacaaacactaagacttaataaaaatcctctcaaaaacattcga

SEQ ID NO: 13038 - DNA, 508 bp, Glycine max
  misc_feature (454)..(454): n is a, c, g, or t
  Coding DNA Sequence Number=SeqID_3259
gagcaatccaaatggctttcgttaaggtttataagactagagcttacttcaagagataccaaactagattcagaagaagaagagagggtaaaactgattaccacgccagaaaggcccttatcatccaagataagaacaagtacaacacccccaagtacagacttgttgctagagttacctgctccagagttatcgctcaagtcatctatgccaccatccaaggtgatagaatcgtcgctgccgctgacttcagagaactcaagagatacggtctcgaagctggtttgaccaactacgctgcttgctacgccactggtctcctcgtcgccagaagactcctcaacaagactggtttggacaaggtctacactggtgccaagaagactgacggtgaagactacgatgtcgtcaacgaccataagggaactgaaaagagacccttcaaggctgtttnggatgctggtcttatcagaaccaccaccggtaacagagttttcggtgtcctcaa

SEQ ID NO: 13039 - DNA, 138 bp, Glycine max
  Coding DNA Sequence Number=SeqID_3260
gatagaaatggagtcctcggcacacataaccctattctcgggcgcatttctagaacctcgaaagttcgatctctccttgaagggtccgaatcgaaagaagatccttctccttctcactttttcttccctcgccatttt

SEQ ID NO: 13040 - DNA, 493 bp, Glycine max
  misc_feature (75)..(75): n is a, c, g, or t
  misc_feature (94)..(94): n is a, c, g, or t
  misc_feature (335)..(335): n is a, c, g, or t
  Coding DNA Sequence Number=SeqID_3261
cgagtactcgcggatattatttaatatcatatcgaaacataaggtaccactaggtatcccgattcaaataaggtnccagacggtgttaataaanttttcgcctcggtcggccgcacgtcttgcgctgtttatattgcgaactagccgaatattgatagatcacaagattgacgcgcgaggtcaactgagcacacctgcactacatttaagtactctctgatcacgactaatgatatctaccaaaaaacaacatatgattgtctgcagagctaacttctcctactatattgctatatacgatttctcgctttatatttttactcgtatcactgcanggcataacgcgcctgatcttgctacgattgacgtatatcactgcgcatgagtgctgtatgatgtgatgagtctgtcttggcgctgccggcgatggcacactgccgtgttacctcccgcagtcgccctctattctttagagttgtcgactaagccacga

SEQ ID NO: 13041 - DNA, 292 bp, Glycine max
  misc_feature (168)..(172): n is a, c, g, or t
  Coding DNA Sequence Number=SeqID_3262
tttttcttttcattgacaggatgacatttataaatggcttgcagctacattctttctctggtttgttctggccatttactttgacaatataatcccaaatgcatcgggtgtgaggaaatcaatatggtattttctaaatcccaattattggatgggcaaaggaggtcnnnnngtgaaaggtgatggggttgataactgtgtaggtgcaaccctatgtctgagacctgaggacacgcacatgagtgatggtctcgttggagaagaaaacggcatgcttcagcaactaacagaa

SEQ ID NO: 13042 - DNA, 341 bp, Glycine max
  misc_feature (265)..(265): n is a, c, g, or t
  misc_feature (303)..(303): n is a, c, g, or t
  Coding DNA Sequence Number=SeqID_3263
cccacctgttgcttcatgtaacgatgagcacgttgcttcatatgtcaaacaccaaaaagttggtttccactgtttgaacaaatcaaacccaattgctaaacaattccaacgcgaagccgatcaaggtcaaaaactcccattggagcacaagacccaagacatccaggcttacgtcgaagttccagttcgttgtgaacgtgtaaacaccgaagagaagcgtctaagaaaggaaactgaaaagaccgccgaacaaaagatccacatngttcaaaaccaagacggtgaagaagaatcattcctgtncgagcacaaaccatggaccaccgagcaagaagaacaac

SEQ ID NO: 13043 - DNA, 365 bp, Glycine max
  Coding DNA Sequence Number=SeqID_3264
atcggctcgagggacgacatcaaagtgtatggtgacgctttggagaagccaacatgactctttttaccaggtcacaagcagcctccaattcgtgcctctctcttcaaaatggccgctaccttctcagatctccacacaggagcggggctcgagtccctcgacgacttcctctctgggaaggtccacctttccggggatcagttcacaaaggacgacatcatagtgtatggtgctgttttggagaagccaggtgactcttttcccaatgctgccaagcggcacgaggttgtcttatctcacctcgctgtaagcttccccggcattgcttaatgggtgagatttagttgtctagctttaacaccctt

SEQ ID NO: 13044 - DNA, 418 bp, Glycine max
  misc_feature (233)..(233): n is a, c, g, or t
  Coding DNA Sequence Number=SeqID_3265
aataataattatgcgcgctggcggggcgctcaatatatccgtctaaaatgttccgcaagaggcagcgcgcgggttatattcacacatctcggtgtgtttattagggggggcgggggtggggcacccacacccagcgcctttttatataagcgcggcgcgcatgccgaaaatataatcctcatggcggcgagctcgaatatataaataagacgcgggggggagaatagtgaatntaatatatatgtgaggggattcattgaagcgggcgcatggcgcggcatacatataataatataggcaccctcctttattatttagatcgcaggtgatatctgtgtgaagagaggtcgcggggggaggaaaaaagttaaaagtagctgtgacgggggcgcaacaccgcaacccacttatataataa

SEQ ID NO: 13045 - DNA, 537 bp, Glycine max
  misc_feature (71)..(71): n is a, c, g, or t
  misc_feature (125)..(125): n is a, c, g, or t
  misc_feature (196)..(196): n is a, c, g, or t
  misc_feature (260)..(260): n is a, c, g, or t
  misc_feature (289)..(289): n is a, c, g, or t
  misc_feature (297)..(297): n is a, c, g, or t
  misc_feature (299)..(299): n is a, c, g, or t
  misc_feature (305)..(305): n is a, c, g, or t
  misc_feature (323)..(323): n is a, c, g, or t
  misc_feature (339)..(339): n is a, c, g, or t
  misc_feature (354)..(354): n is a, c, g, or t
  misc_feature (359)..(359): n is a, c, g, or t
  misc_feature (387)..(387): n is a, c, g, or t
  misc_feature (398)..(398): n is a, c, g, or t
  misc_feature (454)..(454): n is a, c, g, or t
  misc_feature (477)..(477): n is a, c, g, or t
  misc_feature (488)..(488): n is a, c, g, or t
  Coding DNA Sequence Number=SeqID_3266
cagtctgctctgaagagcccaacgtcctgggagtcgcgtagagtcagcgcgcgacattcttcgctcatcgnctcgctcaacgcgtcaatgatcggcgcgatagtgcacaaatatcacctcagccnctagggccacgaacgcgacgactaacagaacgtctacgagagtgcttcgcgcgagtcgtacaacagtctcnactcctccactgagctctcactctctctgtcactctacctcgctctagatgtgatatgtctgcngttggcttcatcatgcgtatgtcatatgntcctagcngntctccncatcatatgctcgctgcntggactcatgcgagtngtgtcatcatacaancatcntcgagacacactctcatactcactcgcnacgcgcgcatncatagagtctattactctcgccctgacatcagcgatcaatgcctctcacacgagtnacggagtgtcgtgcatctatgtncggtgctctcnctctcatgcatctactagatgtacgatgccgctatgaagtagcacatgc

SEQ ID NO: 13046 - DNA, 216 bp, Glycine max
  misc_feature (69)..(69): n is a, c, g, or t
  misc_feature (78)..(78): n is a, c, g, or t
  misc_feature (85)..(85): n is a, c, g, or t
  misc_feature (148)..(148): n is a, c, g, or t
  misc_feature (184)..(187): n is a, c, g, or t
  Coding DNA Sequence Number=SeqID_3267
tgcgcacatattacgatactcagagttatcatgtgtcggtgtatatcggcatatatgattatagagtgngtgtagtanatattgnagcagagtatatcatacgcgtgtgagatgagtaattactatatatgcacagtgcgatccgctngctgcatgcctgtcgagatggcgtatcgcactcgannnncgtgatatatgagtatcgttcgtgtagtg

SEQ ID NO: 13047 - DNA, 489 bp, Glycine max
  Coding DNA Sequence Number=SeqID_3268
ttcagcaaattgatgccctttcagcatactggcaacttgtaggcttgtagtcataattgatcctttgaaaatggaagcactgatgcagtgcagctttcagaatctaaattcattggggattcggtgaaaaaaaaaaaaaaaaaaaaataaaaaaaaaagcttatcgataccgtcaaacttcttttttttccccccgatacccaaattccccctactagcgaatcaaatttaagccccgcacaactgccaagccccctatcccacccccctcctactaacgcaaccacacacgcaccttcctcctctcctctttctaaccactccttactttcctcctcattacccatttatttccgcctccattacatttattctccaccttctttcgtttaccctactctactaacaccccccacccctctcatgttcatacctataattaatctaatttcctcaaatcaacatttacctcctctcacatatcttttt

SEQ ID NO: 13048 - DNA, 586 bp, Glycine max
  Coding DNA Sequence Number=SeqID_3269
atctttgacctaaccctagtatcgggggctctgtgccgtcggagcaccctttctgatcggaataagactttatacagctcagttgagtctgtttccttctgaaataaaaaaagggtgatggaaacccagaagaaaactagggaacatagcctacaccatatagttgatgacatcggcgctgcatttggaatgggagctattggaggttctgtggtccacttcataaaaggaacccaaaattccccgaaaggccgtcggtttgttgggggagcacaagctgtgagcatgaatgctcctcgtataggaggtagttttgctgtgttcggaggccttttctctgcgtttgactacacaatggtgtacattaggaagaaggaagatccatggaactctatcgtagcaggtgctgctacaggagggtttctgtctatgcgacaagggcttgctgctgcttcgagatcagctcttatgggagggctcttgcttgctttgatcaaaggggtccattaatgttaaacaagttagcttattggattgtgtttattgagctttctctgctcagtcttggaacctatatactcttttg

SEQ ID NO: 13049 - DNA, 456 bp, Glycine max
  misc_feature (116)..(116): n is a, c, g, or t
  misc_feature (143)..(143): n is a, c, g, or t
  misc_feature (268)..(268): n is a, c, g, or t
  misc_feature (270)..(270): n is a, c, g, or t
  misc_feature (273)..(273): n is a, c, g, or t
  misc_feature (292)..(292): n is a, c, g, or t
  misc_feature (295)..(295): n is a, c, g, or t
  misc_feature (298)..(298): n is a, c, g, or t
  misc_feature (318)..(318): n is a, c, g, or t
  Coding DNA Sequence Number=SeqID_3270
gcgcggctctactctgtatcttagtcccagccatatcctatacttcttttcaattactcttcttgtctctccctctctttggtccatatattattgtcgaggatgtttgttatgtnttctccatattctatgtattacactanttatatatgagtctcaccctagtaccattatgtgcacgtctattcagccgcatcacgcgccgccgtgagtcgtgataggagcgacagtgggataccccgcgctgctggagggagcgagattaagnanagngtgggcgatggtgatgganatntanaactccggcgcgccgtgagngtatatatatttaatcctcattctgttcacaaccgtcgttctcacgttacgcggtggcagaagattctcttctcactcgtcgcctcgcgacgtgagcttcgcgacgttctcatgcgaaaaacgagacgagggtgcacc

SEQ ID NO: 13050 - DNA, 177 bp, Glycine max
  Coding DNA Sequence Number=SeqID_3271
tattggtgttgaggttcaccctctagacttcttcactaactgtggcaagatccgcttttactgctgggatactgctggacaagagaagtttggtggtcttagggatggttactacatccatgggcagtgtgccgtcatcatgtttgatgtcacagcacgtctgacatacaagaatgt

SEQ ID NO: 13051 - DNA, 591 bp, Glycine max
  misc_feature (45)..(45): n is a, c, g, or t
  misc_feature (81)..(81): n is a, c, g, or t
  misc_feature (494)..(494): n is a, c, g, or t
  Coding DNA Sequence Number=SeqID_3272
acatgctcgcatatactgatagttagttttgtttgagtttaatcncctactatgcatggcaacgaacctcacaaaacgcgncgaccgaacctcacacccctcaaaagaaactgatagatgatatttataagatgcgactgctcgcctcgaggcggatattcagaaggagtcacgcgccgctctggcgtcctgctccctctcggcctgctagtgagaggacacatattcacgtccgtcacaggtccgacactctgcggtatcttgctatgatccctacaataactccttatctccatcagaatgataactctattgcgcctgtgtggtatatactgagagtcccgccgctcgtgatcgtcgatagactactcatacgacaccacctctacaccactcatattcactcgtgactgatcactgatagaatactcactccgagatttaccgtgtactcctctcgagtcatcacttacgcgcatgctacggcgctcacnacactaatatgaccatcgtatacatacacaatgagatgaacgcgacagtggtggatcgaaaatagataatacatatgacgactcgatcgactacatc

SEQ ID NO: 13052 - DNA, 561 bp, Glycine max
  misc_feature (277)..(277): n is a, c, g, or t
  misc_feature (311)..(311): n is a, c, g, or t
  misc_feature (330)..(330): n is a, c, g, or t
  misc_feature (451)..(451): n is a, c, g, or t
  misc_feature (471)..(471): n is a, c, g, or t
  misc_feature (479)..(479): n is a, c, g, or t
  Coding DNA Sequence Number=SeqID_3273
ttcgctccgcaccaatatacaaatagatatgtatggtgcgtgtgcgcgcgcgtgggccagcaacccgccacctatcgctctcatctgttgcattatcattagcgtgtatagaagtgtgatatgcggcatgcgtgcgatataccgcgtcatcacccagacgaaggcgtgcgtgcgggcagagttacattcgctgtcagctcggatgaagcattatacgctggctaagacccggggcgcgaagatcatctcgtgcggcgccgtcgtgtagacgagcacngtgcgcagcacagcgggcggcgtgtgcgtaccgntatatatactctgtatcgncttaggcagtcattgtctactggatatatctcgctacacgccgttacatatatgatcttctgtgtgtttgtattgttggtgttgtgattgctatcagcgcggcggcgctgccactgtcgantagcacgtctgctagctctntccgactnacgccgcttgcgtggcatgtgcagtggatgggttatatcggaccggagcgggagcagtgcttcgatggagccgtggacgtct

SEQ ID NO: 13053 - DNA, 441 bp, Glycine max
  misc_feature (210)..(210): n is a, c, g, or t
  misc_feature (277)..(277): n is a, c, g, or t
  misc_feature (369)..(369): n is a, c, g, or t
  misc_feature (372)..(372): n is a, c, g, or t
  Coding DNA Sequence Number=SeqID_3274
agacatgtcagtgatgatcctccctctaccgtgacggatcaccatcttactcgaccatgtccatctgccatcgatcgagtcatcgcacgtcacatacgagattcatcatcattatctgccttgacggtgcacgtacagtgcgtgtcagtgtccgtacgcgtgcctgagctgctcaggcgcgcgcgctctgattgtggagtgattctgcangtgctacatcctatacacttacatgacacattacactgactgcggctcatacaatgtgactattcancagaccgcgacatcaccactctacatattctgactgcctctcgccttatctgcactcatagagtgctatcgtattatcggtacatagtcacntantatatgtcacagatcctatatctgataactcatgcacatcacgcggatacattatgacacgacgcgcat

SEQ ID NO: 13054 - DNA, 229 bp, Glycine max
  Coding DNA Sequence Number=SeqID_3275
ttcctcggcggacagaaccagaacctcggttgttagtggattggggaagaagctgaaggacatgatggacgatttccaaggtctgagaacatggacgacctccgcatcaaccgatagaagacaatattgggctatagtgtatccaaaagcaaatgaaattctcttatctctcacctatggtcaacttgaacatgaatctttcttaggtaaggggctccatccatactca

SEQ ID NO: 13055 - DNA, 566 bp, Glycine max
  misc_feature (29)..(29): n is a, c, g, or t
  misc_feature (35)..(35): n is a, c, g, or t
  misc_feature (41)..(41): n is a, c, g, or t
  misc_feature (53)..(53): n is a, c, g, or t
  misc_feature (76)..(76): n is a, c, g, or t
  misc_feature (86)..(86): n is a, c, g, or t
  misc_feature (94)..(94): n is a, c, g, or t
  misc_feature (113)..(113): n is a, c, g, or t
  misc_feature (208)..(208): n is a, c, g, or t
  misc_feature (270)..(270): n is a, c, g, or t
  misc_feature (389)..(389): n is a, c, g, or t
  Coding DNA Sequence Number=SeqID_3276
tatactccgtcgtggctctcgagaggganatatantgccgntatgggcgtgtntgctcatgctgctccaggttgtnctgtctatgngggactangagctccgcgtggtggcgngaggcccttgcgccgcacgctgctgttggctattcgatgagcgtctgcagcatgataagtcgagagtgaattagatctactgcgccccgacatantatgtgagtgatttgttatttcgccacgacattctttgacaggatgaatgtggtattttaangctcttaggactctgaagcgatgagagattacagcatacgcgctaagaggcgagattatctcgcgcgcctccgttcacgcgccgccgcaccgggtgggcggtactccgcgcctaacaanaagtgttgtgagagaaggcgacgccgcgcgagacgtatcagcaccgaagcattcctcagagcgcgctaatcctctgcgtcacagagacttgcttcgattgcgggatcgctttctactctcactctctgtcacctctattcagggctccctacaagcgcgcactgtgatatgtactta

SEQ ID NO: 13056 - DNA, 396 bp, Glycine max
  Coding DNA Sequence Number=SeqID_3277
gaatataagcttgcgagatcttttgaggttttaccataaactataaacacttaatggggaaatggggctaatgttacaaaactcttcccacccccattcatatattccataagtttaaacgtataacatgccatttagcgactacagaaaagaaggggaaatctcttggccatgcacgaagaaacctgtgactacccaatcgctgagatcaaagctgctcatttcgaggagtcaatgaagtttgcacggaggagtgttagtgatgctgatattcacaagtatcatgcatttgctcagaccttacagcaatcaagatggttcggaagtgaatttagggtttcagagtctggagataggactactactggctctgacctccttgccagctctgctggt

SEQ ID NO: 13057 - DNA, 556 bp, Glycine max
  misc_feature (437)..(437): n is a, c, g, or t
  misc_feature (531)..(531): n is a, c, g, or t
  Coding DNA Sequence Number=SeqID_3278
tgctgaccctgatatcctgttattggatgaacctaccaatcacttggacttggacgctgttgtttggcttgaagagtacttgaatgactggcccaacactgtcttgatcgtttcccatgctagaggattcctgaataacgtgtgtactgatatcattcacttcagagatcaagtcctcactcaacacaagggagactatgacacttttgagaaaagaagaaacgccttgatcacccaaaagaagagagaatctgaagcccaaaagatgaaaattgaacacactcaaaaattcatcgacagattcagagctaataacgctagagccgctcttgctcagtcaaagatcaaggaactcgcaaagatggaaatcgtcgaggagatcatcgaagatcccgcctgtgtgttcaagttcccatctgctgaggcccttgaccctnctcttttaaagattgaggacggagagttcggatacaagtgctgataagatctttgcttaaagacattcagttttggtatcgatatggaaagtanaaatcgccattgtcggagctaacgg

SEQ ID NO: 13058 - DNA, 387 bp, Glycine max
  Coding DNA Sequence Number=SeqID_3279
tagtatttggctagttctcggtccgtgtgctaagatcttaaaatcgattgcaaagtcttctgaagctctaatcttcctgaagcgatggctaataagtatgatcggaatccattcgctgaggaagaagaagtcaatcctttcgctaataataatagtgggagtgttccggctgcatcgaactcaagactctcgcctttgcctccagagcctgctggtttcgattatggtcgaaccgttgacattcctctcgacaatgaccgatccgcttcacagaatttgaagaagaaagaaaaggaacttcaagccaaagaagctgaccttagacgaagggagcaggaggtgaagcggaaagaagatgctgctgcacgagctggaataagtattgaa

SEQ ID NO: 13059 - DNA, 575 bp, Glycine max
  misc_feature (326)..(326): n is a, c, g, or t
  misc_feature (363)..(363): n is a, c, g, or t
  misc_feature (503)..(503): n is a, c, g, or t
  Coding DNA Sequence Number=SeqID_3280
agttgcagaattaagctcctcgccgatcgcgacgtgtagtgaaggacatgcgagcagatgatccccctccattctattagagctccgcaccccatgtcggatgtacgatgagtatctcagcgctaggacctcgcccgcgaaaataatcgcgaatagatgcgttggctaggatggtcgatcaccgtgcctcgcttgtgttctaagactattgaggatacgtgtgcatgtggctctccttctctccacccatctctgtatattctttacacttgtgctccatagtgggcgttacatcatgtgggtcgctctgacgcgagtaggattcnccaacgggcgccctcatctcataccttcgtgtgttcnactatgaatagctcatgtatgcttttgacgtggttagacactgcctagatgcggactcgacgttgtggacgatatcaagagttacggtcccgacctagtgagttgtggtgagcatcgtgcactctgtaggagaagagacnactctgcggactctgcctgctagtgcgctacttactgtgatgagtggagtagcccctactgagtactctgta

SEQ ID NO: 13060 - DNA, 117 bp, Glycine max
  Coding DNA Sequence Number=SeqID_3281
gttgatggtcaaaacaagatccgtccacttataaaacattatttccaaaacactcgaagtctcatttttataattaataccaatgatagagatccagtagttaagacgaaagatgaa

SEQ ID NO: 13061 - DNA, 542 bp, Glycine max
  misc_feature (84)..(84): n is a, c, g, or t
  misc_feature (143)..(143): n is a, c, g, or t
  misc_feature (179)..(179): n is a, c, g, or t
  misc_feature (344)..(344): n is a, c, g, or t
  misc_feature (354)..(354): n is a, c, g, or t
  misc_feature (382)..(382): n is a, c, g, or t
  misc_feature (393)..(393): n is a, c, g, or t
  misc_feature (396)..(396): n is a, c, g, or t
  misc_feature (421)..(421): n is a, c, g, or t
  misc_feature (424)..(424): n is a, c, g, or t
  misc_feature (432)..(432): n is a, c, g, or t
  misc_feature (486)..(486): n is a, c, g, or t
  Coding DNA Sequence Number=SeqID_3282
gtgctgttgcatgtagatctgatatagttagacgcgattagtgtgcgcgtgagccgtgcgcggcacagagtgaactagagcganaccacgagatgatatgagtcgcgtgctatgccatgcgactacgctatcgtactgcgcantagtatcacgatctagcttagctgcacatactcgcntgatcagcgtacacttgtttgtatcagtagtgatcgacgagatacgaatatagtgtgatacgacagtggaattaacgtatgtcgtcgctcgtgctcacacactacacatgtatctactagtacatacgactaagacaccagacaactcacagacgcatcagacgncgcagcacgngcggcgcgaacgtcgcgtgatgagtcgnctgacactatnacnatctacatactctcacgcgtcgacngcnggtgtgtnggatatgatgtctctatctaccgtgatagtataatctagcgagtctctactccntatatgtactctgtctgcttcgtgtactattatatctctgtgtaggcatgacgcta

SEQ ID NO: 13062 - DNA, 406 bp, Glycine max
  Coding DNA Sequence Number=SeqID_3283
gagagagttatgttttgtccatgtcattgacacagtattaaatattacaaatattctgttcaaaaacaagttttaaaatgagctgtaaaatcaaccatataatcaaaagtgtgattaaaacaattaagtaatacaagctagtttatttctgcttccaacaagcatgcagtgcacttattaaaaaaagggttaggttagtcaattaggcaaaacatgttaaactgttagttcaacaatataaaaatgcatttaattacttgtcttgtagtttatttaacattaattggacaaaataaagctgaatcaatgcttgaaggcttctactgcggccgagacaattgttatgatgtgttgggtgttactcgggatacaagcagagctgacattgcaaaagcctacagaaaac

SEQ ID NO: 13063 - DNA, 504 bp, Glycine max
  Coding DNA Sequence Number=SeqID_3284
tgtgcctgggaatggtcatacggttgtctgacagaccaaaaaagaaaaaaagacaaaaaagtaataaaaaagaagaaaaaaaacaatataaaaaagacctaaacaaatttttttcaccgttctacaattttttgcacatctgcttggaaacttgttcgtgcttaatggtgaaatgtacaagtagaaacactaaggaagggttcttccctcacccaaagataagttgctgtatttacttcttcaaaagagattagatccttactccaaagtactttggcatgagttctttgggttcacatcataaccatttcaggtgaggggagatgccacgttcaaagggtaaaatgaagtttaacattgttcaatgctcaataggcccaggtggcacgttacaagataggactcatttttttagccaacagcctaatgatactaagaacattcataatgagagttgtttatgtaaaaaaattgtgtgtgtttgcattgttgaagttccgagtt

SEQ ID NO: 13064 - DNA, 227 bp, Glycine max
  Coding DNA Sequence Number=SeqID_3285
taattctcgatgttattaacgaatgaaacagtgtttggcacacccacagaaccctctatacaatggaggaatcatccaaaacccagaactgaataatggacttcaagggtggactgcatttggagacgcaagaatagaacatagagaatcattaggcaacaaatatgtggtagcccataggagaaatcaagcacatgatagtgtctcccagaagatttaccttcaaa

SEQ ID NO: 13065 - DNA, 550 bp, Glycine max
  misc_feature (43)..(43): n is a, c, g, or t
  misc_feature (102)..(102): n is a, c, g, or t
  misc_feature (435)..(435): n is a, c, g, or t
  Coding DNA Sequence Number=SeqID_3286
tagagtgtccttgctcgcgagactacgtatccgagacaagagncaagcgggcatatcctacacttccggcgcgcaatccataagagacgtagtatgctcctncttacatttcctcgcgtctcgtcctagtgctatgagaacccttcgctgccacatactactttgatggtgtatactctgagagtgaccgtatgcacactctaggcgccgatgtagtttcattgtgcgctctctgccgcgctcagaggtgcactcacgcctcagccgcgacactctccgcccttcgatgcgttaatacgctgtgttcgagagcagtcacgtcgacggacccccgcaccctgcacgagacgacaacagtgtgtgtcgatctcacgcacggatccagtagatagagtcgtcatccgaaggagcacgtgcgctatttctgcaagcgtnagagcacatcgcccggcgagtgcactcctccgcaccacggtgtggtataacacccacataatgcactcgtatgccctattcgcttcgctcacccatacgctgtaggagatctcct

SEQ ID NO: 13066 - DNA, 540 bp, Glycine max
  Coding DNA Sequence Number=SeqID_3287
gcttggttttattgaaccctaatattgattatgaaataccttatcggtgaaatgagaacaaacaagataatgagttgatatttttaattaataacacaggatctcaaaattcaataaactttaaaagaaatcagaatagctcacagcacatacagacaacacaagagaacaataattgttagcaaagcagttgatttgtgtttgcaatccttattgacacactgtcaataatgcaataataaattattttgtttaaagaatggtgttaaaattaacaagatagtaccacaagcaatggtatgtgaaaaaccagataaagcgaaaagagcaacaatgtatttacataagtaatttaggaatgacttcaagtatgactacatactgtgtacacagcatttttcaccgagaggcaatagatgcaagacttgacaaactacttggcccacttggagcattcccactaagcttttccatctcttcatcagtctgattgctctttaattcttgaagtgtgtaaacaaatcggttccactcatcaag

SEQ ID NO: 13067 - DNA, 559 bp, Glycine max
  misc_feature (145)..(145): n is a, c, g, or t
  Coding DNA Sequence Number=SeqID_3288
agctgcctcgctataccactgtcttccgctcacccactagctagtcgcgcactctgtcgcacagtctcacatgcgtctgtcttcgttagcttctatcttctctctccttcactcctcccgtctgctcctaagtccgcactcttcnttcctcttcgtccgcgcggcggagggtgcgggccgcccatcgtcctaggcgctctgatctcttcgtgccctcattcggcgtctcatccccgcctctatctcctctcgccaatccttgcttgttatctcccatctgttatctctccttcgtctgctcctcttctttcgtggtgggtgtacaactaaaggcacaccttgcttgtcctgatcccattccctgctgtcttcgccttctctcttgtgtttttgtattctggcttttgtttgttgtgggagaaagaaattcagcggccgcgcgtctccgcgccgcgctactcttcttgtgaggacaaatccatctcgccgtccttcccctcgcttcgattcttataattcccttatcttttcctatctttctatcccgtactctttttct

SEQ ID NO: 13068 - DNA, 249 bp, Glycine max
  Coding DNA Sequence Number=SeqID_3289
gcgctattcgcacagcagtctttaacactctggcaacatctcgcgacaccttcgactcgatctacgtcttcacagacttccagtcagatgatgagatcggcagcggtgtcatggacgagtatgaagccttggctgcgagccgtggctgcaccctcgtacctgttcatgctacatgcggcacggcggagaaccttcgtcgcttgacttcctctgaacgcggcatgcatggcaagctgaccgatgcagagc

SEQ ID NO: 13069 - DNA, 448 bp, Glycine max
  misc_feature (319)..(319): n is a, c, g, or t
  Coding DNA Sequence Number=SeqID_3290
ttcgacgtgtaggttatatcgccccccacgccagcgtgcgataggagagactgtactcttttcagcgtctgcagctctgccccgcctttggcgttgtgatattgttactgcgtacatgttggttctcctattctctctattattctctacagtagcgcactcggttattgcttcgcgcgcatcataaatgctccgagagatacccagtgtgtgaatggaactaggtatatactgcctcgtcttatagtaacacgacccgcttggcgatattgtaaggtgggtagtatcgtcacagttacccagtctttatagtctatcncactcttcggcatgtatcgctctatgcgaccagctgcgccattcttggactgtgtcgctgatctgtgtatttgattataatatcagcgaggagcagacatctgtgcgcgtggttatcttgtgcatttat

SEQ ID NO: 13070 - DNA, 499 bp, Glycine max
  misc_feature (102)..(102): n is a, c, g, or t
  misc_feature (399)..(399): n is a, c, g, or t
  Coding DNA Sequence Number=SeqID_3291
ctgtccttacgctgaatcttcattactcgtcgcgtccatcgcctcgcgcactcctacacgctaaaatacgatagagcatgctgcaagcgtgatctctccccnagccacgttctccctctcacgcgcgccgcgctgcaagaggcgctggacacgcacacaaaagaagagtcacatataatcgtatcagtcgaatgcggcgctgaccgcaccacctacacatgatcccgcaccacgatcccgcgcatggcgcaggatgcgatggcaaatacagcgcgttcgagcgcacgacagcacccagacacaaccacaggacaggtgggacagagagacgacagcgcggcagaccacagcatgccggggcgcgggcgcgtacgcgtagcgagtgcgagcagtctgatncattgtagtaataatgatgctataataagtactctaacatcgacgacgggcgtgtgtggcgtgttcatctacttcgcgctttcattgtttatacgagtta

SEQ ID NO: 13071 - DNA, 534 bp, Glycine max
  misc_feature (77)..(77): n is a, c, g, or t
  misc_feature (128)..(128): n is a, c, g, or t
  misc_feature (165)..(165): n is a, c, g, or t
  misc_feature (333)..(333): n is a, c, g, or t
  misc_feature (337)..(337): n is a, c, g, or t
  misc_feature (444)..(444): n is a, c, g, or t
  Coding DNA Sequence Number=SeqID_3292
gttgttatcgcgctgcggccatcatggtgtgtcagaatatatacatatcggccggcgcggcgacatatatatatacnctctctcctgcgatgcggctatatgacacgatgataatgtatcacatacantctgtcgcgtacgcacgctgcgcgcggcgtcggcganaatatgacggtatacaatctgatagatgctgtggcgaaaaatacacgtgctctgctcgctacggccctgctatcctatgtgcgtgtctatacccaatatacgacgcgtcgtctgatcgtcgtgcgcgcgcgatactcgtgataaaaccgcatgcactaacgacgcccnacangacactgtgtcttgattgtcggccgggcgtgagtatactacacgagcgtgacgtgtgattagtatgatcgcggtgaggcgcggtgggcgagagacatatgagtgggnctatatcgcgtgcgcgcgcgctctacggcgcggcgtatataatgcgatgtatggtttcgattatcatgcactgtagttgtcacggacggt

SEQ ID NO: 13072 - DNA, 305 bp, Glycine max
  Coding DNA Sequence Number=SeqID_3293
ggccttagaggtccctatagtgatgtctgcaccaaggtgagctctggcatcaaatcttgcctagccaaagggataaaagtttagttgtttttgtggagataggtcataggtagatacttcccattgcatacccctcaggacgcaaggataagtgcgattcttaccttgggaacaattctatggggggaagccctctttctccccctaaagaatccgctgtattgacggcatgcactaggacaagtaagaaggtccaagcttgtattggcagatacttgcaaggtactgcaaagggtcctgcaaca

SEQ ID NO: 13073 - DNA, 515 bp, Glycine max
  misc_feature (283)..(283): n is a, c, g, or t
  Coding DNA Sequence Number=SeqID_3294
atggcccgtacaatgtatactgtctattaactatgtcgacccacacaccagcatcgcgtaaatataccttatagtcatatagacatattctaacttgtacgcgcatatttattagtatattccacccgcctatacacaactcgccgcctaaatactgtcgtgctgcctactgtggcgctgcggaccgcccatcactattcacgcgcatgtttcttcttcattttgccacatgcacatattcgatcgtgaccccgatataaatctatctgttgaataagatcgnctcgcggagttgatgttgtgccgcgattactgtgctgctatatataatacgttatgttcgatatatattcggtactcatattcaatcatatctgtgaggcggtgatagagcgaaggtgacggtgggcgactaccacctcatcccactccgtcactgccgccacactacccactcctctatatattatttatttcatagaccatcgatgtatcattgtcctgtatctcataaa

SEQ ID NO: 13074 - DNA, 394 bp, Glycine max
  Coding DNA Sequence Number=SeqID_3295
aatgtgtgtagacaagtgtgtatacaatttgctcctttattcaaatttcaatgtgaaaaacactaaattttctcatatttgaaggtgggagctttcaaagactcttcatgatttcttatctcgatgaggagatacttgtaagtttaacatactatcattctccggaatcaattttagataaatttgatgcatgtgtacccttgtagatgactatgctgacagagctaatgtgaaatctcaaattttgatgcacgctctaagaagcacatgggtatatttcaactaatataaatatgatatggggatatggtcaatttttgggattaaatgttccaaatatacattgttaaagttgttatatatgtatatgtataataaagtctcttgcaactaa

SEQ ID NO: 13075 - DNA, 349 bp, Glycine max
  Coding DNA Sequence Number=SeqID_3296
gacggcactggagtatgttctcacttttttttacttgctttagtgaacttttcccttcaaagatttaatgcaattctcacacacaccctatacatactagaaaattgagaagagatacaagtgacctaagttgacgaggccaaaaatcatcataagaacaaaataaaacttccacagtgatatcccattaatttgatgatatgaactctattcatagggcttattagagatgtgattaacaattaataaacatttttaacaacataactaaataacacatttcgtaactaatacaactaacacttgattaatatcctgatttttttctttttcaggttcgtgattacat

SEQ ID NO: 13076 - DNA, 580 bp, Glycine max
  misc_feature (216)..(216): n is a, c, g, or t
  misc_feature (282)..(282): n is a, c, g, or t
  misc_feature (301)..(301): n is a, c, g, or t
  misc_feature (303)..(303): n is a, c, g, or t
  misc_feature (359)..(359): n is a, c, g, or t
  misc_feature (474)..(474): n is a, c, g, or t
  misc_feature (489)..(489): n is a, c, g, or t
  misc_feature (531)..(531): n is a, c, g, or t
  Coding DNA Sequence Number=SeqID_3297
cagtgtgcagtgtataacgcgcctacgtatactcagagtgagagtgtccaccacaagaccggatagcactataacgacgagtggtgatgttcgctgcatctaacacatcggagttggtgtgcatatcatagattatacgtgacgacatacacacgcaacatctctcatcacacacattcgagtcatgtactcatatccaattatacacgtgtacanatcatatcctcatatctgtacatacatcctcacgtcgcgcagctatgtctcacatctcacacacgntgagcgctacgtctaatcncncagacgcgcacattacatcattacatatatacgacgagtcacagtatacactgcgntacatacgactatgtcgcacgaacagactaagatacgtcgaagatcgagtatagatatattattgatgtgtgccgatgatactttcatacacgttctcctgatgctacatatcancgcgtatcgtgatcntacgcattgatgatagcacgagatgagcgttaatagatgagnaatagatatgacgacacatataggtacactgtaccgaccactcagatat

SEQ ID NO: 13077 - DNA, 575 bp, Glycine max
  misc_feature (29)..(29): n is a, c, g, or t
  misc_feature (40)..(40): n is a, c, g, or t
  misc_feature (64)..(64): n is a, c, g, or t
  misc_feature (125)..(125): n is a, c, g, or t
  misc_feature (128)..(128): n is a, c, g, or t
  misc_feature (225)..(225): n is a, c, g, or t
  misc_feature (239)..(239): n is a, c, g, or t
  misc_feature (249)..(249): n is a, c, g, or t
  misc_feature (298)..(298): n is a, c, g, or t
  misc_feature (336)..(336): n is a, c, g, or t
  misc_feature (343)..(343): n is a, c, g, or t
  misc_feature (350)..(350): n is a, c, g, or t
  misc_feature (362)..(362): n is a, c, g, or t
  misc_feature (429)..(429): n is a, c, g, or t
  misc_feature (492)..(492): n is a, c, g, or t
  misc_feature (497)..(497): n is a, c, g, or t
  misc_feature (501)..(501): n is a, c, g, or t
  misc_feature (508)..(508): n is a, c, g, or t
  misc_feature (520)..(520): n is a, c, g, or t
  misc_feature (538)..(538): n is a, c, g, or t
  Coding DNA Sequence Number=SeqID_3298
gatgtcatggttctgtcagcgtgtcgtantctgtatcgcnagcatgatagtcatcgagtcatanacatcatctgttgtagtcgacagcatgaatatcatacactatgcatatgcacgaatctatngtnctcctaaccacctctgactcactgtacgacggactatcatgtcgtcacgtgacgcatgacgcagcttacagtgctgcgcaactcacgacgtgcactncagcgtcagccatntgctatactncatcgacgtgctgatgctgtaatcattccgtcagcgtcgcgggctccancaagcgaccatcgtgctgatatgtatcgacaactgacngctcgcnctcctcntctagcaactgncgtcatctaacgtcgaatctaaatagtcagtatgctgaacaattcagtgtaggagtaaatatgacancgtcgcgatcgactgtatagtgatgcgtcgagtggacgtcgtcatgtctgatgagtagacgancgcgntcantctctantagcagcactancactctagtagcgatagntagtaaatgatcagtcgtcgtaacatgatacgctgca

SEQ ID NO: 13078 - DNA, 511 bp, Glycine max
  Coding DNA Sequence Number=SeqID_3299
atagtctcgccggacagcagagcgggccctcattcgactacacgcgtccgctttcacttgcatcgctcaagcccaccacatatcgtcaccactacgaggcgagcggacctcactgacggcagaacactagaggacgcgtaacggcaatctaagagaggagcataccagaacgcggaggacgagtgatacaaccattgaacacgctactccacgctctcccactagcccaccctgccctgcgtcacgaagcgcagccgacgggccgacgacttagtgggttaccccgctgagactagcacgatcgcccgtcgcggcgagatcgtcacctgcgacgtattatgtaagccgttatccccacattatcattagatcttggcttggatttatcatatggatcagacacactatacatacgcttgactaccgtgttcatgtatcctgcaacacctcgatcgtatgcgtatactcaatatacatgagtaaaggcaagtagtcgtgtcaggcccaacga

SEQ ID NO: 13079 - DNA, 537 bp, Glycine max
  misc_feature (44)..(44): n is a, c, g, or t
  misc_feature (53)..(53): n is a, c, g, or t
  misc_feature (66)..(66): n is a, c, g, or t
  misc_feature (73)..(73): n is a, c, g, or t
  misc_feature (148)..(148): n is a, c, g, or t
  misc_feature (165)..(165): n is a, c, g, or t
  misc_feature (172)..(172): n is a, c, g, or t
  misc_feature (206)..(206): n is a, c, g, or t
  misc_feature (213)..(213): n is a, c, g, or t
  misc_feature (219)..(219): n is a, c, g, or t
  misc_feature (274)..(274): n is a, c, g, or t
  misc_feature (286)..(286): n is a, c, g, or t
  misc_feature (288)..(288): n is a, c, g, or t
  misc_feature (321)..(321): n is a, c, g, or t
  misc_feature (323)..(323): n is a, c, g, or t
  misc_feature (336)..(336): n is a, c, g, or t
  misc_feature (343)..(343): n is a, c, g, or t
  misc_feature (351)..(351): n is a, c, g, or t
  misc_feature (353)..(353): n is a, c, g, or t
  misc_feature (389)..(389): n is a, c, g, or t
  misc_feature (391)..(391): n is a, c, g, or t
  misc_feature (407)..(407): n is a, c, g, or t
  misc_feature (411)..(411): n is a, c, g, or t
  misc_feature (428)..(428): n is a, c, g, or t
  misc_feature (451)..(451): n is a, c, g, or t
  misc_feature (453)..(453): n is a, c, g, or t
  misc_feature (462)..(462): n is a, c, g, or t
  misc_feature (480)..(480): n is a, c, g, or t
  misc_feature (491)..(491): n is a, c, g, or t
  misc_feature (498)..(498): n is a, c, g, or t
  misc_feature (505)..(505): n is a, c, g, or t
  Coding DNA Sequence Number=SeqID_3300
ctagtcactgatcatattatgcgtgtgcatgtaccgccgcatantacatgctnggactcaccgtanatatgancgtgtagtacatgtgccgcgatactagatcgaagtagagcggacgctgatcgcggactgcacgcctgcccgacgncgatgctgtgacagagngtacgantgtctagctcgtagcatgtatgacggtgcggctnatgctanctgtcnctctggcgacttatgtagtgcatagtcaacatccatctactctatacgtaatccncatacgcgcagnancgcgacactgctagtaaactatacgcatcactncngacgccgatctcncgatgcncacgtctncncgccgtcgatccatgtcacatctacgtcgtcatcanangtagtataccaacgantgtntactcatactccagcgnatctaggataatgtgtagcgtangntcaatctcnactgacgatagtctgcanctacgcatcgngatcagncgtcatnaggctgacgtacaacgagctgcatatatcccg

SEQ ID NO: 13080 - DNA, 600 bp, Glycine max
  misc_feature (45)..(45): n is a, c, g, or t
  misc_feature (90)..(90): n is a, c, g, or t
  misc_feature (106)..(106): n is a, c, g, or t
  misc_feature (132)..(132): n is a, c, g, or t
  misc_feature (172)..(172): n is a, c, g, or t
  misc_feature (174)..(174): n is a, c, g, or t
  misc_feature (176)..(176): n is a, c, g, or t
  misc_feature (224)..(224): n is a, c, g, or t
  misc_feature (245)..(245): n is a, c, g, or t
  misc_feature (253)..(253): n is a, c, g, or t
  misc_feature (291)..(291): n is a, c, g, or t
  misc_feature (304)..(304): n is a, c, g, or t
  misc_feature (313)..(313): n is a, c, g, or t
  misc_feature (317)..(317): n is a, c, g, or t
  misc_feature (351)..(351): n is a, c, g, or t
  misc_feature (361)..(361): n is a, c, g, or t
  misc_feature (462)..(462): n is a, c, g, or t
  misc_feature (490)..(490): n is a, c, g, or t
  misc_feature (518)..(518): n is a, c, g, or t
  misc_feature (536)..(536): n is a, c, g, or t
  misc_feature (554)..(554): n is a, c, g, or t
  misc_feature (574)..(574): n is a, c, g, or t
  Coding DNA Sequence Number=SeqID_3301
agagtcgtcagcctggagcgctcactgactctgcgtcacgatgcnatgtgtgtatcgtacgtcaccgactgtgaagacatgagatgcatnacactcctggatattnctggagacgaccgcatcagttgtcancacagtgcctgctgcagactcctcgagaatgtcgtatgcntntntactgcactgacacgttgtacgtgcacgccatgttcttctgacatttnatgacgctgactataacgacnatctcgcngccagtgctggcgaacgacatcagccagcacacgtganctatctaacgacnatctcgtgntctntccagctatcgctacatacgatcatcgtagtggnttgataagcntatgatgcgagcatgaatatatctactgacacgtaacgcgtcggatgtagcgcactatggcagcactgtagtcgtgtgagtcgccgaatttatctgctctncgacccacactcgcgactactcatagcnactagcgctacctacggccgtgcgtgtntgtccggtagctcatcgnctgacgtgatactcacgnctatgcacagctgggtcagntgcagtatgactggtagcttgtctga

SEQ ID NO: 13081 - DNA, 590 bp, Glycine max
  misc_feature (34)..(34): n is a, c, g, or t
  misc_feature (44)..(44): n is a, c, g, or t
  misc_feature (175)..(175): n is a, c, g, or t
  misc_feature (270)..(270): n is a, c, g, or t
  misc_feature (278)..(278): n is a, c, g, or t
  misc_feature (355)..(355): n is a, c, g, or t
  misc_feature (359)..(359): n is a, c, g, or t
  misc_feature (362)..(362): n is a, c, g, or t
  misc_feature (383)..(383): n is a, c, g, or t
  misc_feature (442)..(442): n is a, c, g, or t
  misc_feature (445)..(445): n is a, c, g, or t
  misc_feature (455)..(455): n is a, c, g, or t
  misc_feature (516)..(516): n is a, c, g, or t
  misc_feature (551)..(551): n is a, c, g, or t
  misc_feature (561)..(561): n is a, c, g, or t
  misc_feature (564)..(564): n is a, c, g, or t
  Coding DNA Sequence Number=SeqID_3302
gacgtctgctgctcgattatcggttcttactgtnatgcgaacanaccgcgtccgcgcgcgccacgatcacgtcatttgtacagacgctaggtatatcgtgtactatcagctatggctacgagactagcagcagactatgtgtcgagtactcgtcgcacgtagtctacactgagtntcactgtgtcacgagcgtggtgcggcatcgagtgcgtaccggagacgatatgttagaatgcgctaatgctgcaatcgcactgagctcacgcgggnctacatgnatgaatctagtcgcgtgcgcgattcattcgatacaggtcgacgcttgcgatcacgtggcgtcgacgtaccagtaatncgangtncacgtgtagctagacgctgtngagtacgaccgcgtcgcgacgctgtcgacgctacgctcacacgcacgacggcgtcgctngancgatagtcgngacgagcatgtacactagtcggtgacgcagtcgtatcagactgtcatgccacggcgacgtngacatctacgccagccgcgacgatgtctgctgtancgaagctgangcnagcgcggatcgatgcctgacgacaat

SEQ ID NO: 13082 - DNA, 334 bp, Glycine max
  Coding DNA Sequence Number=SeqID_3303
cgtagtgatcgttcggaatcgtgataaagataattatagaactataataacgttgatagacacgagtgtacagtagacacgttgaagcatgtattatttaatattctatattatgactataacgcgacaaccgagagtaacatcagcggagagccggatcaccacagagacacgagaacaacatcaccttatatgactgttcttatctcctactttaaaacaacacgcccacaactcgactcagtgcttcgatttggagcgcgtcggtagttcacctatctgctctcttacgttgactctcctttggtcgatatttggtatcggtctcggcagc

SEQ ID NO: 13083 - DNA, 573 bp, Glycine max
  misc_feature (140)..(140): n is a, c, g, or t
  misc_feature (252)..(252): n is a, c, g, or t
  misc_feature (452)..(452): n is a, c, g, or t
  misc_feature (469)..(469): n is a, c, g, or t
  misc_feature (533)..(533): n is a, c, g, or t
  Coding DNA Sequence Number=SeqID_3304
aatagaacagcaagcgacgcgtcgcgacgtcgattctcgtcttcgtctcctacagctattatattctactacgtactcgtatgatgtgggcgtaggtgtggtagcacgacgtcagatgtgtactcacatatctgtgtttnacactatactttacactgatactacatacactccctacctgacttgcagtgacgatagttcgcatagactatctctacatataatattcgtttatatcacataccattcacngacgattctgtagtggtgctcgacatcttggactcatgatattgtatgttcgtgctgatttttgtcgacctacagagactcacgcgtcacagtatcctgtcgtgagttgaagcaaacgatgaacgtagaatggacaccatattaatcaatagtgagcatacatacatactcaagacgatacattctgtcgcgcacgtgtntctgacgtgactgtgantagtctgtcatgttatgtgagtcagcgtttgatagagtgtctcggacatgtgatcctgacatgntgaccctattgtgattagactgacgtagcggactccatcg

SEQ ID NO: 13084 - DNA, 516 bp, Glycine max
  misc_feature (290)..(290): n is a, c, g, or t
  Coding DNA Sequence Number=SeqID_3305
gagtcggtcattcggcgttatcatctgatcgatcaatgtcacgacggaattgagaagagcgctatccgatgcgtaaggcatagttcgattcagctctagtgtgagtcactcatactcgcgtcggagaatagacatgatctaacccacatatactatactttacgaactatccgagtacaatcggtgcgccgagctagtatcgcgaacagacatctatcagtattgagtgcggcggacgaagcaacacacccggctatactcacgcatagcatcgatcgtatcgcgcactntcttcgctatctccaccaccgaacgatgcgcgcatgcgagacaagtagactgttgggctgcgtgagctcacatgacagatgtataataattgctcgaattctgagtcaggtatagttagtaagcacactaaatataacgagatatcactagtagaaccatcatagccgatggcgtgcgtctctatgcgatacagtgtagtgtagtagcattactccgtctcatagg

SEQ ID NO: 13085 - DNA, 523 bp, Glycine max
  misc_feature (80)..(80): n is a, c, g, or t
  misc_feature (113)..(113): n is a, c, g, or t
  misc_feature (409)..(409): n is a, c, g, or t
  Coding DNA Sequence Number=SeqID_3306
ctcgccggcctatcgaaacattaatcccaaagtgcgtccgtacgcccatataatgtaataaatattagagaccgcgcggncgcgctacagcagatatatcatattataaaaanatgcataaactgcgcgcagataagtaaagatagctcgacacgcatcgccgcgactgtaacgttctatatttagaatactgtccagtatacgtaagatcagggctgcgtcatggtgtcatggcgagctgggggcgatatctatactcgggtagtgcgtgttgagagtggttggaatgtggttgggcgagggtggtggtggcggacaattattattagagctggtcgcagacagttgcggtgcgatttatgtccgcccgccgccacttattctgttacagggggcctctaacgccccngcccgacttatatgaagtggaaggtagagagtattagtatagagtatgtttgtaattgtaaaagggggggaggaggagaagatgtgggcgtggcgatttgggtgttatagtcaa

SEQ ID NO: 13086 - DNA, 366 bp, Glycine max
  Coding DNA Sequence Number=SeqID_3307
gctgcgtccaccttgccgtcgagtgcctcctcccctccggccgccccgattccctcttcatcctccagctccagcccaaccccgacaccccggacgtcaggcgggtcttccgtcgcctagccaacctcctggcccctcggcgcgatccccatccccggctgacaccgcccttcgcgccgttgaagaggccttctcccacctcttggagagcacctccaccagcgccggtttcgctcctgctgctcccggcggcgtttccgtctcagagatgtgctctggacggtctgcccccactgctgccatgtgcatgagtacgagcgcatgctggtggggtgtttgtttgggtgctcgaacccctggttcatg

SEQ ID NO: 13087 - DNA, 591 bp, Glycine max
  misc_feature (344)..(344): n is a, c, g, or t
  Coding DNA Sequence Number=SeqID_3308
atccatctcaatcctcgaattactcccccccgctgcttcaccctccacatacacccccgcatatccccgctgcgaggtacttctattatatcatagctatctccacaattctcatagccgacgcacgaccgctcgaatccacatcgcactcgtcatgagcatgtgagtgatataagtgaagagcacacccacgatcgactaacgtaatctccgccgacaatgatgtagatcgtggcgtgtatcggccacacgaacaacccatccccgcatctatccttcacgttcgacgactacgatacacactgtgataccatgccgcgcgatcgtgcactggagctacactnatagcgacattctacgagcagctgcgcgcgcacgacactattcatcacatgacttcactactctcgccgcgcctctgctctgatcatgtaaagtacgccgcaccacgactgctactaatatctgtaggtcatcacacatactaatgacgctacacatggccgtagatgacactatataaggagagatgtgtcggtcgccgcgcaccatacacacgtcctcagcgcccgatagcgtagtacacatcta

SEQ ID NO: 13088 - DNA, 366 bp, Glycine max
  Coding DNA Sequence Number=SeqID_3309
gtatctcgcgaagtgggactacccacggccgacgaatataatcttgttaagagagtgggtccccaaagtggccgcggatgcttacgtagcacccaacggggaacgcgacggccaatgcaccggctgataaagagcctccgtctggcccggttgcgtcctccgcagcgatctcaacaagatcagcctaggatcctgctcctacgttcacgaacgctccgttattcacgctgctggggcttctccccaggacttccaactgacactttactatagagggatccgactaatggattatacaacctggagacgtccagcactattgaagccagaatgcattatggaggagcactccacccttatggaaag

SEQ ID NO: 13089 - DNA, 591 bp, Glycine max
  misc_feature (47)..(47): n is a, c, g, or t
  misc_feature (90)..(90): n is a, c, g, or t
  misc_feature (152)..(152): n is a, c, g, or t
  misc_feature (157)..(157): n is a, c, g, or t
  misc_feature (166)..(166): n is a, c, g, or t
  misc_feature (177)..(177): n is a, c, g, or t
  misc_feature (207)..(207): n is a, c, g, or t
  misc_feature (213)..(213): n is a, c, g, or t
  misc_feature (220)..(220): n is a, c, g, or t
  misc_feature (225)..(225): n is a, c, g, or t
  misc_feature (250)..(250): n is a, c, g, or t
  misc_feature (317)..(317): n is a, c, g, or t
  misc_feature (325)..(325): n is a, c, g, or t
  misc_feature (332)..(332): n is a, c, g, or t
  misc_feature (393)..(393): n is a, c, g, or t
  misc_feature (411)..(411): n is a, c, g, or t
  misc_feature (455)..(455): n is a, c, g, or t
  misc_feature (466)..(466): n is a, c, g, or t
  misc_feature (475)..(475): n is a, c, g, or t
  misc_feature (483)..(483): n is a, c, g, or t
  misc_feature (513)..(513): n is a, c, g, or t
  misc_feature (533)..(533): n is a, c, g, or t
  misc_feature (546)..(546): n is a, c, g, or t
  Coding DNA Sequence Number=SeqID_3310
gtgtcatatcacgatcaacgctctataccacatatgagcagatcgangtgcacgaatgtgtcattctctccatcctcctctcacgtgttntgtattcaataagatagacatcactataatatgatctcgcacgtacgcttcctatacttganatacngctgctctntatagatactntcatcgactcctgtcagtactagtcatatncatgcncccgctntcacncgcgctgattggcacactacgtcgncgtctgctcgcgcagtcgtagatatcgcgctgaatacgagccacagaccacaggacgttgagtccanctcagcantatacgncaagtgtgacgacgtgacgtatatgagtatatatactgatgtaatagtacgcgcgtagatntctcgactacgtcacagntctgacatacgagatgcgacgcatcaggtaggtgcacatgacantgctacacgtngcgtccacncgcctgcngacgactgttgtagcgtcatacctgacagnagatgggctgccgttgtaanctgactacggcgnagacgacccacacagcgatcttagcatctgtcgtcccttgacatc

SEQ ID NO: 13090 - DNA, 570 bp, Glycine max
  misc_feature (208)..(208): n is a, c, g, or t
  misc_feature (543)..(543): n is a, c, g, or t
  Coding DNA Sequence Number=SeqID_3311
cgccgttcgcactgtagaatatataagtatactgtcctgtatgccgccggttaggtgagtggcgatatcactacaggtgcagatcaatgcctcttgtcgtaaactaacataaagagaaagagggggggggggcgttgcggggcgtgaggtacatatgagcaaggtatgcatagtgcaggcgtgaatgctgcagatgagtcactacagnaccgcagcgtgccgcgaggggcgtactcggatcaacgactgcaatgcagataatatcgcgggcggacgatcagcatctctctaattaattgtgacacacgtgtgatactatacacgatgcgaacacacgtatcattatctactattgtggtcgtgtcacgtgtaagagcggggctgcgtcaagagataacgagccggatcagcattccgtaccggccacggtcctccctcgccgcgtgtagtggtgggcggcggcggcgtgatatatgggttacgaattatgattttcgaagtgagtgcgcggccgcgcacgatttcgcctcactttgtcgcctntgtaggtcggttgtaatcacggttgtg

SEQ ID NO: 13091 - DNA, 590 bp, Glycine max
  misc_feature (98)..(98): n is a, c, g, or t
  misc_feature (178)..(178): n is a, c, g, or t
  misc_feature (259)..(259): n is a, c, g, or t
  misc_feature (341)..(341): n is a, c, g, or t
  misc_feature (343)..(343): n is a, c, g, or t
  misc_feature (413)..(413): n is a, c, g, or t
  misc_feature (449)..(449): n is a, c, g, or t
  misc_feature (527)..(527): n is a, c, g, or t
  Coding DNA Sequence Number=SeqID_3312
gtgattctgttcaggagttcctatttacactttttgcgcgcggttgttgtatcaggctacacccgacaattcttgaggcacaaatacacaaggcagtnggaagagtagttttgtcgacggattgagataggtattacgagactcggagagaagagagaaagatcaagcgcatcagtcncgtagggcgctgatatttcatcaagcgcagagcagagtgtatgaccaatgcaagatgtatagtgtatacgtagtatgtgtnatttcctaaggtatataatttgtagatctccgcacctccctccacctcctataacgtgtggaggcgcgcgcgagcgcagcgncnacgtgagctagaagcgtcgctactggatgcccgtcgagataacgagacactctaacctcgacacggccancaggaggggagtacctggcataggtagtactagtancgcgcgcgccgtgcgctcgacgacatgatgggtgaggtgccgggccgcacgcggtggtggtgtgcttattctggcgcnccctccccctctctctacacctgtgcgcgcccccgtgctatacttcctttatcccacgtgtga

SEQ ID NO: 13092 - DNA, 515 bp, Glycine max
  Coding DNA Sequence Number=SeqID_3313
tcgaaccctaatctaggcaggaagatgatgaatttggggttgaagatgatgaggaaccttggatctgggtgtgcgaagtttggacgcagtgagagatggtattgtgtttcgagacgtgaaaagatatccttctcgacacctccagaggttaccttctcgacgcctccttctctagttagtctcctgtttacatccttcttcgggtatctatggtaccaaacaaaagctgcttcagaacaggaacgtctctgggatgttctgtctgaaaagagaaaccagattaggatcctgtcgcgacaagacgagtccaagcgtaagaaagtaaaagaggcagaaataaagcttattgaaaaggcagcaaccgtgcttagtgaagaaatccaagtctaatgtctgaagtctctatgtattcaatatctctctctctatgttaatataagttggtatgcagtttgtggtttcactgtcttctaaaactgatatgtaataagtttgctacttattagagaggcata

SEQ ID NO: 13093 - DNA, 257 bp, Glycine max
  misc_feature (103)..(103): n is a, c, g, or t
  misc_feature (112)..(112): n is a, c, g, or t
  misc_feature (124)..(124): n is a, c, g, or t
  Coding DNA Sequence Number=SeqID_3314
gtcgcagattcctcacagcaaaggtatgcgtatgacttactggactgatcgcgagcgatccaacagtcatttctctgaaagcgctgctggaacttccgacgantgatatctncatctcctcttnctgcatgaatcacgtaaaatggtccatcgttatctcaggggatttgaatgaacctcctcttcttcggccaagggtccggaacttaaaagacccgtttttcagggtggggaaaattttaaaatccggcactgtg

SEQ ID NO: 13094 - DNA, 299 bp, Glycine max
  Coding DNA Sequence Number=SeqID_3315
ggatctgaggcgcttgtctcctttgccgttgctaccagtgctgccttccccgggctaatcaaggggcaagaaattgatcacagcccacgggcaaatgttgcctaactgatggaatgtgactttgaccaaagcatatgcctttctcccagcaccttaatgcattatgctcaaagctctcttttctgcttgcagcctcagcgtgatacatacacgctactatctccttctgattcatagctggctgtttggataccagggttctaccttccctgctcaacatatacacagttttcttggca

SEQ ID NO: 13095 - DNA, 322 bp, Glycine max
  Coding DNA Sequence Number=SeqID_3316
ttaaattcattgtgggtggagcgcccagatttgagcttaggatatgccccaagcttactggcaagctgaaaagggaagttatcctaggcccgccaagtattgatgatcctgcccaatataccccgaaattgaagatgctgccagcccaggacctttcattggatgatccccaaatatgacgatgtcccccccttgaaaactggaaaaagatcttctgcttcccaaaaaaacgggtgggacccaaagggtttattcatcccatggaccaaattctttggacatttgacccgtgggaaagccaaccccctgaatgttaaactgg

SEQ ID NO: 13096 - DNA, 267 bp, Glycine max
  Coding DNA Sequence Number=SeqID_3317
actcctgaaggtatgttcctgaaccctgaacaattatttttttttcttttcttgtggtaagtggacgatgcacatgaaaatgattccattatgctacatggcccagtggcctagtagagtcatgagtgcaatcgcagacgtaagagtattgggtgttcacattttctttttgttatttatcagaacacactgctacctgtttatctttagcttgttcgtgttaatttccaaaaattgctttcacatttccttgaaggcttgacctca

SEQ ID NO: 13097 - DNA, 579 bp, Glycine max
  Coding DNA Sequence Number=SeqID_3318
gaggctctctgtgatattggctgataatcgccagtcgatgttcgtggggtggtggcagagggagtcactcacacgtcggaatatgggacggtggataggcgttcatggcacactgggtaatgtggtgggaaggggaacgagcggagccgttatcggtagagagcttggtatatctgggggggaggcgcggctacacgattctgggaggtcagtagaacccatcacagtgcgactgagatatcgcgttcttggagaaagacaatcatggcttaattgccgttctgctgattgtaccgagaataagccaacgcgatgtgaatggtcgcagaacatacaaatccaccgaggccggtgcgcactgtggatcaatggggcgtgccgtgaggtgagatcagccgctcgactcgcgggagacgaatctggagtcggtcgatattagtgaggccattttcgggagacactatcatctccagtgcgcagaaagattgtgaggtgacataagatgggcgggggagggcaggaccaaagaccactcagactccaaggtggggggcgccggcaccctcaatatgctaagta

SEQ ID NO: 13098 - DNA, 586 bp, Glycine max
  misc_feature (61)..(61): n is a, c, g, or t
  misc_feature (163)..(163): n is a, c, g, or t
  misc_feature (252)..(252): n is a, c, g, or t
  misc_feature (273)..(273): n is a, c, g, or t
  misc_feature (357)..(357): n is a, c, g, or t
  misc_feature (433)..(433): n is a, c, g, or t
  misc_feature (468)..(468): n is a, c, g, or t
  misc_feature (498)..(498): n is a, c, g, or t
  Coding DNA Sequence Number=SeqID_3319
aacagcgtggtggtgagtatgtactgatgcagctggccgaccgctactgcgcagtaacacncatacacgcgatacaaattaggtgtatattaatgttatatgatatcgcgcgtagatcgaacaactgaacacacacacactcttctacagtgagtatatattntgtagcactgatgctttctgctaagtacgtatcacctcgcgatcacgcgcgagccaccgcggactcctgatgtgtagagtggcgtcatnatcatggtgtgtcgcatagcngcgatgtgcgttcgtcgggtgccgcggccacgcacctcgtactcgcccagcgcccgacgtcacgcgtgcacataccctctcagnagagatgcgtgattctgtagatacatcagtcgagtgctccgcctacacatacgcacgcgtgcaagacatacgacgncgcactaacataaaccagctcacacgcgtgtgtgnccgtgacgcgcgtgtatagcgtcagtccancttctcagacagtcgatatgacagatacgtagcacctctgtaccacacgctgcacacctactagaactcatgagtagcgcacgcatgc

SEQ ID NO: 13099 - DNA, 595 bp, Glycine max
  Coding DNA Sequence Number=SeqID_3320
tctcgctgtaaatacactttaccatcattaagaagtttacattcaaatgtcatggccgagtttgctttaatttttcttttagttgaaaacggatttaatggacaattttaccatttgaattcctacacaatatgcattatctctccctttactttcaaacaaggacttaattttaagtattggcaagttggcaacacctttaataatcctgtttcagctttagcaagcaatttagtaataatattgtacatgttctttgatgtagaaccattttgggcgttggatgctctaaaatggatcttgtggttggtttcattggctaggctggcattatttacactctgttgatgtgattacagataagatccatagtaaaatgggcgaaggaacttttgggcaggtcttggagtgctgggacagagaaagtgctgggtttcttttactagtttaattagtttcctttgaagattttgctctgatttcagttcttgaaactcaccggttgtaatgatcaatgtgttagacccgtagtttatcaagtatagcattagcaggagatgtttttctggtgtgctttgttttgtttgctaaacca

SEQ ID NO: 13100 - DNA, 221 bp, Glycine max
  Coding DNA Sequence Number=SeqID_3321
attgttttgaagtaggtgattagtagcttggtcaattaagatttgtaatgtagaaaaaagacagcataggaaatgtaagtggtaggggcttaatggtaggcataaagttggtcactgaattagacaacaagacatccgaaaaggctgaaacggttgtcgtgtttgaaaaactcaaagagcttggtgtgctagttgggaaagtagaaattcatggcaatgtt

SEQ ID NO: 13101 - DNA, 471 bp, Glycine max
  misc_feature (292)..(292): n is a, c, g, or t
  Coding DNA Sequence Number=SeqID_3322
ggtcaaaagcttctagcagctgtctaccttggaggtcaatattttgatattcaggactagtagcctaaatgcttgagatgggttgtgttattcgtctaatgcccattattttgctatttgtaacaagctgaagtgcttaagcttgagggagagtgtcagagtattaggattactaagtttcagtgttatttgcctgggcttgtagtagttttaccagtactagacacaatttctagtataaatagaagtattggattgtggtattgtatggcagctatatatcaatttcagnatattagttatctttctatctttttcttcttccttacctgaaccttatatttccaaacgatgaattgctaatagtttattcattgttccatatcatttactcccaatagtctggcatgaatccggcccttgcgtacgttgtgtcagtcatcactttgcatattaacgtcacttccgcca

SEQ ID NO: 13102 - DNA, 427 bp, Glycine max
  misc_feature (261)..(261): n is a, c, g, or t
  misc_feature (387)..(387): n is a, c, g, or t
  Coding DNA Sequence Number=SeqID_3323
attctcatactactcatattctccctctgcctatatacaacttgtataactagctgcgctctcgatgctggcccaccccctcaccacccactccccaccactttcctcttctcctccgtattcaaatatacttggttgtgttgtctcaccacacatcctcgtgctgtgtcgttgtacatcctactgccatccctcttattcgtgcgcttcgcgtgcgaacggtcgcggctctaacaaccatgaatctctgcgcgctccctnggaccctctccttatcctctccactccctctaccgcgcactacatactgacgccatcccttctcgcgcgcgtgcgctgcgccacacacacatcataacatcatccataatgcgaggcgcggctccngtactctacacacaatacgcgggcgacgactagaaactgt

SEQ ID NO: 13103 - DNA, 439 bp, Glycine max
  Coding DNA Sequence Number=SeqID_3324
tgggtttgccgttattaccccagagggaaaccccttttttgggaaaaaaaagccctttattttttaaaaaaaatttttgaaatttgtaaatccgaacaagggggggaaaaaaaaaaagggggtctttgtgcttagaaggttaaaacaaatgttttagccttggaaaaaggattatggtgcaagactacgtgaaacaaaggtcattttgcataaacttgggagtgaagatggatccatttagaaagtggggcgaccgccgtccggaagaaggaatagttccagaataaggtgatttatttaattaattattcttatttgggggttggctttggtttatgccctgttttaagggcattgccttctatatatccggaaatgaaggaaatattatagggaagataagattggagtagggcgaatgaattcctgggtactgtaa

SEQ ID NO: 13104 - DNA, 578 bp, Glycine max
  misc_feature (146)..(146): n is a, c, g, or t
  misc_feature (333)..(333): n is a, c, g, or t
  misc_feature (472)..(472): n is a, c, g, or t
  misc_feature (512)..(512): n is a, c, g, or t
  misc_feature (550)..(550): n is a, c, g, or t
  Coding DNA Sequence Number=SeqID_3325
acatatactatattcgtctccgtccacacgcgtacgaaacactgcctcatgcctcctcatgcagatcgccactcatatgacgaatgtatatcaatgctgcgtacgcagtgtgaatattgctgtgattagtgaataaatatgctcgnagtatcctcatagccacgatctgcgcacatttgctcaagtccacgtatcacacgcacaataccctactctcattctctctctctcgaactcagtaacgtatcagcaagagcacgacctgcgtgtaggggttgaatagtgagatgtcgctcgtggcggaagaaagagcgatacatgaaggtgaaaganaagacgtatagtagagatcattcacgcgtaacttcttcgcggcgatactcagtctcgtagtagatgatatgactgttacactagtagtcgcacaacagataaagtaggagaggctagtccgggtcctgggacagaggcnggggtcgcgcggttatgatctatgacagatacgtgagaanccagcacctctcaaccactgcagagagaggcgagaggnagcgaagcacacgccctatagattcaat

SEQ ID NO: 13105 - DNA, 470 bp, Glycine max
  misc_feature (312)..(312): n is a, c, g, or t
  misc_feature (371)..(371): n is a, c, g, or t
  Coding DNA Sequence Number=SeqID_3326
gtcgtgtgttgttctgtatggaccagactacacggacacgccttacagtgggcactccgcacgcgctctcgaacaccgtgcggatgcatcttgatggcaggcgagatgtctccgaccgctagaccgatcacagcgaacatagtgagaagaagatcatagagaatagagaaacataaactaatgacataacagatacatacatgatgttatcgtgtgtacagcacacacagagacccgaggagtcaatcacgtctcacacgagtaagtctagagtgcaggattgttcgttgataataggagagatgatgagantagtggtgtggcgtgacagagatataacctcagagacgatgccagatactaacacgagncactcacatctcttctataagtgtagtagaggagtgtgtgtgtgagtgtggaccacggtacactctaatcacttacaccttacgtaatatgttctcgtg

SEQ ID NO: 13106 - DNA, 524 bp, Glycine max
  misc_feature (35)..(35): n is a, c, g, or t
  misc_feature (312)..(312): n is a, c, g, or t
  misc_feature (466)..(466): n is a, c, g, or t
  Coding DNA Sequence Number=SeqID_3327
acggagacatactatcatcgccatccaccctcacnaccactaatcacaccctcaccatacaccacaacacaacaaatccaccaaatacaacgacaccacacctcaccattcttctcactatcacattctctactctacacatctactcacctctctacgcacaccctctacataccactcccaactaacatcaaatatactctctctcctaccactaccatcttcattcactcccacacccgcactctacctactactccacaacgagtaatacatctacaaacacacaaacatccattcacataacagaantcacctatcactatcaccacttgacacctccattactccaccctacatcaactcacacacctaccgcactcgtactcacgatctacaacactccatctacacaccatctctgcacgattcactcacacaaatatacacttactcgctcgctctnctctatctaaataaaccttacctcacactcgactatttactaccagtccaacactcta

SEQ ID NO: 13107 - DNA, 589 bp, Glycine max
  Coding DNA Sequence Number=SeqID_3328
ccgtttcttcctattaatcttctgtcgctggtcacttcaggcagaattgctactcgatctttatccttctacttttctccctctcccacttaattgtttctacataacatatctcgatattgaattgttagttggggtctgtatgtctgtatataggggcggtggtacggagtagcggtgtggtacgggggagcttagtgtgatcgtgtttagactgatatcatcccatcattacccactgcgtcgttgaagtgaccgctctttttttccttattaactttatctaatttcttcctccggcaccgccgctccgtcatactagtataaatctgtatatacgaacaaaggaaagggagcatagtgataagttccgtatcgtgttgtgcggtcgcttgagtgcagcgggcgggttcgctcgacggcgcggtgtcgtagtgcatccaactcccaggaaaaatgattgttgagggagtgtaagtaggaggatctatacatatgtcgtctgtgcaaacggtgtagaaggaaagataagcggaggcaaatgacggggtggggtccgagcattaaatagcacacagcggcgcggttt

SEQ ID NO: 13108 - DNA, 491 bp, Glycine max
  misc_feature (99)..(99): n is a, c, g, or t
  misc_feature (194)..(194): n is a, c, g, or t
  misc_feature (220)..(220): n is a, c, g, or t
  misc_feature (260)..(260): n is a, c, g, or t
  misc_feature (263)..(263): n is a, c, g, or t
  misc_feature (265)..(265): n is a, c, g, or t
  misc_feature (267)..(267): n is a, c, g, or t
  misc_feature (351)..(351): n is a, c, g, or t
  misc_feature (448)..(448): n is a, c, g, or t
  misc_feature (463)..(463): n is a, c, g, or t
  Coding DNA Sequence Number=SeqID_3329
tatacactatatatgcaggcgcgcgactatacgtggtgtagctcacatgatgtatgatgtatgacacgcgcacccgtgtgatcatcacgatctgtgctnaatatattgttcgtcgttgtttcctactacacatgcatcagcgtcgatatatacagagtctgtgtccgcatacgatgtacgcgtagacatgacantcgcggcccgacgtgctcgaagggancgataatagacgattatagagaagcatgatgataaatgancgngntncctcacgtcacgacagctgagacgccgcacgcctatattatataatgtactagacgcgggccacgagcgcgcgtatcacagaanagatatatcgcgtctgtttggatatgagtctattccatgtcgcggacagtcacatgcgagtagactatattaatcgtgtcatgtgcgctatgcgcgncgtcgcgcgtgctgnattgtacgcgccgtacatagtatgaaga

SEQ ID NO: 13109 - DNA, 388 bp, Glycine max
  misc_feature (88)..(88): n is a, c, g, or t
  misc_feature (105)..(105): n is a, c, g, or t
  misc_feature (335)..(335): n is a, c, g, or t
  misc_feature (350)..(350): n is a, c, g, or t
  Coding DNA Sequence Number=SeqID_3330
gacacaccggtgtttattctgtgtataccccaaaacaaataaacaaactatgggcgaggagcacagtagaggacaagggcgccaaacntggaaaggcgcggaagngcacaggaagacaacacaggagggcgatatagaataagggctaagattcaagccgagccaccgtgttagcgcgccgcaccttttgtgtttttgtttatgtatttactagaccaaacaaagacacacagagagttgatacagacaaaaacacaactagaggcggagcaaggagggcactacaaacgacgtattggtagccgaccctttgaggcgcgaggaatgacggtttnccaccctctctgtcncattaacaatattgtgtatgtgggttgtacgcccagcc

SEQ ID NO: 13110 - DNA, 318 bp, Glycine max
  Coding DNA Sequence Number=SeqID_3331
ggaactacctgccttcaatattaaacaagaagattctaataaagacgtacctgcattgtagagcagagtgtttttgaaaactttagctagtaacctacctgttgatactatataatattgatcataatgactgtggatagaaaacactctaaacggtgatacacttttggaacttgttgatgggtttcagctgtttgcaaagattgaaatttggtgcgatgggatatgatcaccacatactaagtggatggcgtttgctgagccaaagtatgttgatcatagtgctaagcgtgaactagcgtgttattcagatggaca

SEQ ID NO: 13111 - DNA, 233 bp, Glycine max
  Coding DNA Sequence Number=SeqID_3332
tttcatatcaggatggtggcacgctttgttcaagagttctagagtaagatcaagaaggacggtagtggatcgtccagagctcttgcaaggttgaggaccgctgttagaaggccgagataacactatcatcagctgctcagacctccgatgtgagtgcttctctatacgagcgtcatgatgttgtcgcctctgttactcgggtcatatcgtaggagctcatcaggcatctgttc

SEQ ID NO: 13112 - DNA, 448 bp, Glycine max
  Coding DNA Sequence Number=SeqID_3333
ggaagagaaatctcctcgaccccattttcactaacccagagactcaaaccggactccgttaatctcgtcggcgatcgttctctctggcaatctcagctgtctcgtctcccggcttctcgaggctacagcaacgcgtctctcgtacggaagatccctgttctgttccacataaacgcggggatggaggaggttttggcggattacgttcaccaagagctgaccaggaatctgatggtgatctctctggggttgttccagatcatcgttatcaaagacgtcgtcgtgtttcttttcttctgagcaaaaaaaggaatcatcttttggggtctctctctatcacctgtttaatgaaatagtgagctaaagtctcttcctttttgtttttatctttcttctgttatgaataagaacattgatgcttgtgttgcttcagtttctcttgttttca

SEQ ID NO: 13113 - DNA, 308 bp, Glycine max
  Coding DNA Sequence Number=SeqID_3334
atcaccggcctgcagatcggtcgaagctagagacctctcaccaagaaatttgaagcaatggcggccggtctgcaggtgttcgggcagccggcgtcgactgacgtggcccgggtgctcacctgcctcttcgagaagaacctcgagttcgagctcgtccgcatcgacaccttcaagagggagcacaagctgcccgagttcatcaagctaagggatcctaccgggcaggtgaccttcaagcatggtgacaagacccttgttgattcaagggcgatatgccggtacctgtgcacccagttcccggaggacgg

SEQ ID NO: 13114 - DNA, 536 bp, Glycine max
  Coding DNA Sequence Number=SeqID_3335
agtcttgttcttcgttgtgcagtgcacctacattcttttgttcaaacaaactgttcttcacagactatttagcatcatacttccaaaccaactgttcaacaatatctcaagatgaagtactacgccgcccaagttttcgctcttgccagcattgcaaccgcattcccgcatccccagcttccctcgctaccatccttctcgctaccaaccggaggactaggctctggtctaggctcaggtcttggtggaggattgagtctaccaaccaaccttccatccctcggaggtggaggtggtctcccatccctcggaggtggaggtggcctcccatcactcggaggtggcctcccatcacttggaggtggaggtggaggcttctccctccccaccaacctcccttctctcggaggtggcctcccatcacttggagggggaggaggaagctttctcccctccaacaacctacccagcctgggtggaagcagcacccggacagggggttcaggcctgaacagctggctcaccggccaaaggga

SEQ ID NO: 13115 - DNA, 339 bp, Glycine max
  Coding DNA Sequence Number=SeqID_3336
gtcacaacatatcaggtagttatatttcatatagttggtttgcattattctttggattgtacacttttacttaaatggtgatctacatgtactaattaacatgattctgccatttgcactgattgcaactgttcaaattttgacatgaatagctttaaatagaaaacattgagtcaatcacatcaaattgtctaatattcatatgttaatcaagatgtagttcatacgaccaactactgctacttttgtgcatggaaaattgagcatgttatcttgaagaaaatacttgaaaaattaaaaaaggtgtttctgttgtgtccaaacatattcttaaattct

SEQ ID NO: 13116 - DNA, 542 bp, Glycine max
  misc_feature (83)..(83): n is a, c, g, or t
  misc_feature (89)..(89): n is a, c, g, or t
  misc_feature (91)..(91): n is a, c, g, or t
  misc_feature (200)..(200): n is a, c, g, or t
  misc_feature (206)..(206): n is a, c, g, or t
  Coding DNA Sequence Number=SeqID_3337
cgatttggcctcaattccgccattcctttttttcttttcttttattcctcttttaatttctttttctttttcatggaccgcanatacananactatcaccatcatcctgctcatttggcacatgcttctccccctgaatactttatccacctgaagaacacaacttacaaagacgatctatatttaaagaaaaagacaangatacntcgatagctttattatacttatcaagtaaaagagtcttacccatcaaatgaaaataaacacctaaaaagcccaagaaattattaagataacaaccaaaaaagctcagaaatatcagctcctatcaaacctaaaacacaaagaacacctccacctattaaagctccagccttatctttagatgacctaaagaagaaaactaacaactgtatttcaagaacattaataagtaaaagatcgtgtggaagagtagattattcaaccttgaacagttagaagaccagtactttaagaaaactggatatttcgtcttagcgcgaatcagattatgagttttt

SEQ ID NO: 13117 - DNA, 548 bp, Glycine max
  misc_feature (88)..(88): n is a, c, g, or t
  misc_feature (122)..(122): n is a, c, g, or t
  misc_feature (125)..(125): n is a, c, g, or t
  misc_feature (127)..(127): n is a, c, g, or t
  misc_feature (142)..(142): n is a, c, g, or t
  misc_feature (253)..(253): n is a, c, g, or t
  misc_feature (295)..(295): n is a, c, g, or t
  misc_feature (317)..(317): n is a, c, g, or t
  misc_feature (351)..(351): n is a, c, g, or t
  misc_feature (400)..(400): n is a, c, g, or t
  misc_feature (405)..(405): n is a, c, g, or t
  misc_feature (408)..(408): n is a, c, g, or t
  misc_feature (412)..(412): n is a, c, g, or t
  misc_feature (416)..(416): n is a, c, g, or t
  misc_feature (419)..(421): n is a, c, g, or t
  misc_feature (426)..(426): n is a, c, g, or t
  misc_feature (431)..(431): n is a, c, g, or t
  misc_feature (471)..(471): n is a, c, g, or t
  misc_feature (473)..(473): n is a, c, g, or t
  misc_feature (478)..(478): n is a, c, g, or t
  misc_feature (488)..(489): n is a, c, g, or t
  Coding DNA Sequence Number=SeqID_3338
ataatccgagacacgcacctcacaatcgcagcgataacacacggctgtgtacgcgccactgattgagctgatcgtgagacgatacgcncgcgaccatgcggccgggcacacgcctcgccccncananacacacaacaccganatcaggtacggagagagaagagagagagcagaggatcgacactggcacgagtctgggcagggccacgccacggcgggggacgagaagctgcgacgctgattgcttcctcanctctctctatctctacactctcattaaaacacctatttcttnttatctctatgcttgtactatnatagtaactgcagtgagattgtgaaaagagtttntacttacaccactctcacatacagcatcggcgagctctacggtctgacnatctngtnttcnaatnatnnnttatnctctncaacacatcacgaggccagcacatttagatcctgacagcncnctctncccctactcnnaatgtccgtcatacacgtatagattatattgagagtagagaaggatcgcgacctcacct

SEQ ID NO: 13118 - DNA, 521 bp, Glycine max
  misc_feature (89)..(89): n is a, c, g, or t
  misc_feature (237)..(237): n is a, c, g, or t
  misc_feature (367)..(367): n is a, c, g, or t
  misc_feature (388)..(388): n is a, c, g, or t
  Coding DNA Sequence Number=SeqID_3339
gactggtccaaatcaacgcaccgtttactcgcagcatccattatagtgatgtgacgtgcaatgtcgcggaacgtctacgtagcgtcgangtgacagtgttgtaatattgaatagccgatatatttgaatcaattcctctcctctcaccacaccgctatatatgtcgccgtccttcaagatattctctaaagtaagcctacggcaatccatagagaggtgtcattatatgttagagtnaccaccattcgaggtgagtgtgggcgggcaaagagcgcgagggggactagcatatcttgttgtattacatgtaatgggtatgagagagggttcgtcgcgggacaagaaaagaacatacatcgctcactcntggcacgatcacagcgctccntaggcaaagcacctgctctgggaatgtgttgtctcatccctctgctcccgtatatgtaattgtgtggtatcgtctagaaattatacacaaccacgatcctccgtctctgtatatctgattgcctttgtgttaa

SEQ ID NO: 13119 - DNA, 593 bp, Glycine max
  misc_feature (36)..(36): n is a, c, g, or t
  misc_feature (71)..(71): n is a, c, g, or t
  misc_feature (101)..(101): n is a, c, g, or t
  misc_feature (103)..(104): n is a, c, g, or t
  misc_feature (169)..(169): n is a, c, g, or t
  misc_feature (259)..(259): n is a, c, g, or t
  misc_feature (280)..(280): n is a, c, g, or t
  misc_feature (346)..(346): n is a, c, g, or t
  misc_feature (350)..(350): n is a, c, g, or t
  misc_feature (375)..(375): n is a, c, g, or t
  misc_feature (435)..(435): n is a, c, g, or t
  misc_feature (501)..(501): n is a, c, g, or t
  misc_feature (516)..(516): n is a, c, g, or t
  Coding DNA Sequence Number=SeqID_3340
gttgtctactacatctgatcaagtgctagtatatgntggttaagcatcgccttccatctacgcgaagctanattacattactcctatcagcgatactatcntnnctaatagagtgacgctcagatatagctgctcgtattgcaccgatgcatgctaccggctacactanatgcactcactcacactcagctcgctcgacgcgacgcctactcgcactataatgacgcatgtcgtagagagcgagtgatatatactatancgtactccacagagctctcgnacacactacccggtacatatgcgctagacgattgaatcgctgcatgatatgattcgatatcgatgnatcncagcgacgatattgtcgtgagtatngacggatgagttatgtagcacgacatgagactacacacatcacacacatactataattanacaagaccacactcagtacgagataacggatagcatcagaggcatgcacaatatattagatgatanatggcttggggacgntgccgtgatgtactcgcaggatagtactcacgtatgacatatagacactcgcatccatgtcatatatcatcctcctg

SEQ ID NO: 13120 - DNA, 596 bp, Glycine max
  misc_feature (34)..(34): n is a, c, g, or t
  misc_feature (62)..(62): n is a, c, g, or t
  misc_feature (66)..(66): n is a, c, g, or t
  misc_feature (75)..(75): n is a, c, g, or t
  misc_feature (77)..(77): n is a, c, g, or t
  misc_feature (84)..(84): n is a, c, g, or t
  misc_feature (150)..(150): n is a, c, g, or t
  misc_feature (200)..(200): n is a, c, g, or t
  misc_feature (203)..(203): n is a, c, g, or t
  misc_feature (222)..(222): n is a, c, g, or t
  misc_feature (225)..(225): n is a, c, g, or t
  misc_feature (230)..(230): n is a, c, g, or t
  misc_feature (235)..(235): n is a, c, g, or t
  misc_feature (240)..(241): n is a, c, g, or t
  misc_feature (284)..(284): n is a, c, g, or t
  misc_feature (289)..(289): n is a, c, g, or t
  misc_feature (317)..(317): n is a, c, g, or t
  misc_feature (389)..(389): n is a, c, g, or t
  misc_feature (467)..(467): n is a, c, g, or t
  misc_feature (555)..(555): n is a, c, g, or t
  Coding DNA Sequence Number=SeqID_3341
gtatctgtcgatataccagaggatgtgataggantatgatattttcatacgatatatgtcantcgncagctgtcntnactacgntcatgttacgtacctatctactatgtacgttagacattatcgctaacgtctcgacacagtgacacncagcccacgtgtgatcgcgtaacaccatgcgacgattactaggacgacantcntgcacactcgacagctgtnacnacgtnctacntcctnnctcattaccgtggtagcgtcgcgtgcacatgttcacgagacgnactgngtgtgagagtacggaacggcagtacgtncgtacgctgacgtagtcggggcaagcgacgacgatgagagttgatcgtatcgtgtaacaacgatgtatgagnaggtagtattgggtaggttagtaaagattgctgatcgcgcatagtgctaatctaatatcggcctcgtcgatgtgtagnatgcatgtatcatactcgccgctacgtcgatgcatggagtatgacgcgcactcgctctatcgtgcagacgaaagctgatgacggagcnacttttgtactcatacatgataatcatcgtgctacaagcag

SEQ ID NO: 13121 - DNA, 490 bp, Glycine max
  Coding DNA Sequence Number=SeqID_3342
gaacaaaatcgtccgtctgatcgcaccaagccgatccgcctcctctagattcatggagcctgtatcacgctttctaagctccggtactcctccgccgcagtcaccatcaccgtctccgaatgaggatcaggttgtgaagccagatcagaagcttcaagagaatctgcagatgcccaaggaagaggaagatgaagaagaaggaggaggaggaggaggtggagagtttttcaacaaagatacgggtgagatcggagggcctagaggtcctgagccgactcgttacggcgattgggaacaacgtggtcgatgctccgacttctgattgagacgtgatgatcccaagtaaatctcggtccttgttcatcattttgattccacaggaattaaattcactttctataagttgtttatgtattcgcaaataatggaagaacacagaagaaaaattaaggagaagctggaactatgatttgtctggattccttgtgtt

SEQ ID NO: 13122 - DNA, 344 bp, Glycine max
  misc_feature (273)..(273): n is a, c, g, or t
  misc_feature (283)..(283): n is a, c, g, or t
  Coding DNA Sequence Number=SeqID_3343
gctccagaaccaaccgaaccgggaggcaaaccaccgacttcttggccttcaaacccgccgcctccgccgaaaaaggtccccccaccgggcggtgggttaacccggaagcctgggaacaaggccggggccgccccagtggcaaccttccggaaaaaaatcccccccctggggaaacccggcaagaaaggaaagaagggcggtaagggtcaagggtgaaccttcttcagaaaataagggccacctcctccaccttaatccacgggtttggatccntgtttttggnctggcccaccaaccattcaccaaaaaccactgggtacaggaaccaaatttatgaaccacct

SEQ ID NO: 13123 - DNA, 315 bp, Glycine max
  Coding DNA Sequence Number=SeqID_3344
ttttgtggtttgttgaaatcttaatttttaatagcatcacaaagaggacattttaaacaaataagtacaaggtgtctatgagaaatgtacaaatattgtacagcagggaaaacaccggcaatcaaatccagcatttctaatcacacgttttttgatttatgatgatatggaatgatgacaatcacgtaacagtctctgcgtggtgtttgagaacggtaaaaccattcatagccagtccccgaggctacgtttggtctccctctccggtactcgtaattggttattaacttttgttcgcgtcattttctacctggg

SEQ ID NO: 13124 - DNA, 536 bp, Glycine max
  misc_feature (128)..(128): n is a, c, g, or t
  misc_feature (130)..(130): n is a, c, g, or t
  misc_feature (137)..(137): n is a, c, g, or t
  misc_feature (159)..(159): n is a, c, g, or t
  misc_feature (298)..(298): n is a, c, g, or t
  misc_feature (311)..(311): n is a, c, g, or t
  misc_feature (315)..(315): n is a, c, g, or t
  misc_feature (317)..(318): n is a, c, g, or t
  misc_feature (403)..(403): n is a, c, g, or t
  misc_feature (441)..(441): n is a, c, g, or t
  misc_feature (452)..(452): n is a, c, g, or t
  misc_feature (495)..(495): n is a, c, g, or t
  Coding DNA Sequence Number=SeqID_3345
actacgtccttgtgcgatctacaaccggacactctcgacgtcactctctctagttacctacctatgttcatcgctctacaccgcgcgcatatcgatcctctcactcttcatgctcatgcggtggtatntngtcagtnaactttatcttttgtcgacagnatatgtgcgtcatcgtagatcttactccggtcatcatactgtacctcggtactgactctcgctactctcacactccatactcatacttactcgtcactgcactacacgctcaccgtcagtcgcaaccgactgtttatcntcggccactcgantcangnnatccaacatatctcatgtctcagctgcatctgataccgccccgctctctgctcagtggcgtcatatattcctcatagccctcctncgtcctcatccttacgtcctcatcacactgctcactanatgcatcctcnctcatccgtcgtgcatacgctgtctccttagtaccctccttcnactaccgttcgctaccagatgcatgcgacgatactgtccac

SEQ ID NO: 13125 - DNA, 582 bp, Glycine max
  misc_feature (66)..(66): n is a, c, g, or t
  misc_feature (236)..(236): n is a, c, g, or t
  misc_feature (460)..(460): n is a, c, g, or t
  misc_feature (482)..(482): n is a, c, g, or t
  misc_feature (524)..(524): n is a, c, g, or t
  misc_feature (546)..(546): n is a, c, g, or t
  Coding DNA Sequence Number=SeqID_3346
tcacgctcctgatctataccagaatatatatgtatagcctccgctattcattgttagtatcgcagnatcgatagtgtcgagacactccgcatacgcatccccctagagtaagcgcatcccacacctgcctgctatccaacattcaccacttcacgttcgcggactgatctcatggcacagagactagatcttcggccgcgatcgcggtgctgttctctgcttataatgtctaagtnagagtcttagtcgttattcgtaggttggtgatgcgatgtcatgtattgcatttgtctcctctttctccttatgttgtcccttctctcgcattatttatttgcggttgacattttgtcatgcctcagatatgttggactcaggtctcccatcgtgccactaggtatgactagtattactcggtcgcgtggccggtggcggtatgaatgatagaatgagaggtatntttgctgtaccgccctggccgncgtcagaattacgcgagctttccagcttaatcaatgtgtagnatcgcgtcccgcaccgcacagncacctgccaacatataaacacacaagctcatcgcca

SEQ ID NO: 13126 - DNA, 566 bp, Glycine max
  misc_feature (128)..(128): n is a, c, g, or t
  misc_feature (181)..(181): n is a, c, g, or t
  misc_feature (190)..(190): n is a, c, g, or t
  misc_feature (226)..(226): n is a, c, g, or t
  misc_feature (245)..(245): n is a, c, g, or t
  misc_feature (263)..(263): n is a, c, g, or t
  misc_feature (265)..(265): n is a, c, g, or t
  misc_feature (289)..(289): n is a, c, g, or t
  misc_feature (388)..(388): n is a, c, g, or t
  misc_feature (397)..(397): n is a, c, g, or t
  misc_feature (440)..(440): n is a, c, g, or t
  misc_feature (446)..(446): n is a, c, g, or t
  misc_feature (496)..(496): n is a, c, g, or t
  misc_feature (516)..(516): n is a, c, g, or t
  Coding DNA Sequence Number=SeqID_3347
accgtcgtgtcatagactcttcatacaccatagtataccgtatatacaccaatctcactacgatatatagaacgatatacacacatcacgtcgtcgcaataacaacatacatttaatatcgaacgcanatcgatatgaataagtataatatacagtgtatcactcatatatatcatattanctcatattnactatgtctgacgtatatcgtaacaatgatgacatnacatacgtatctagtactnatcgaatagaatattacntnacaacatatcgttcgacgtactanacgtgagaatgagttaacctgctggacatattaatatatacttgctaattaactaagcactgatagtgtatacatctcgactagcatactaactcttcntatagtatntatcacctacacctagctgtcgtctctgactgtagtaatgttnatattnacactgtcgcgacagacgcgtcgatctcttccctcgactcgcattccacnctacatcgtgctgtatcatnaccctgtcgtcctacgcgttcgcgcgctaccgacctgacagatcgtcgta

SEQ ID NO: 13127 - DNA, 262 bp, Glycine max
  Coding DNA Sequence Number=SeqID_3348
ccgtgtttagttatccgagcctgcccggaatgagtctcccttaatggcaagtgaagctggtcaacggtctgatgggcgtatatggtgcatgcgtaccgccttgcggggtcggtcgctgtccgctttactttattatatgcgataagcgagcagaatgtttattcatacccctaggccgtggatgttatatgggcctatggttggagacgagtcctgtaggctagcactgacttcgtctctcagatcttcctcctttccatat

SEQ ID NO: 13128 - DNA, 289 bp, Glycine max
  Coding DNA Sequence Number=SeqID_3349
gacataaagtatgcaaccgctcaaacgaagcaatcggaagacgaggcgattcgagtgagatacaaacacgggacaccactggaaggaggaaagatcgcagagtctgagcctgtagagttgttctcaagcgctcaaggcatcgaaaagggaaaggatcaggcagcgtctgagatcactggagatcagaaacagatgcaccgtgacgttaaagataatcccggaagacgtacgaatgatagccctcgttaaacttatgtagcttaagtcagttctatatgcacttttctaa

SEQ ID NO: 13129 - DNA, 449 bp, Glycine max
  misc_feature (32)..(32): n is a, c, g, or t
  misc_feature (35)..(36): n is a, c, g, or t
  misc_feature (71)..(71): n is a, c, g, or t
  misc_feature (174)..(174): n is a, c, g, or t
  misc_feature (198)..(198): n is a, c, g, or t
  misc_feature (337)..(338): n is a, c, g, or t
  misc_feature (400)..(400): n is a, c, g, or t
  misc_feature (415)..(415): n is a, c, g, or t
  Coding DNA Sequence Number=SeqID_3350
gtttgacacatatcttatcgcacgaaacacgncannaggactcgcgcggcagagcagccggattcattcanccacgcgccgtgcgccgcgcaggtgacagtacagaactacttcacctcgacatcgtccatatacatcgccagtacactcccgcaggcgcgatgactgtgatgnagaagtctcacgttttctgcgacngcttggctatagtggtcatctttgtgttgtggtagacgttgtttgacgcggctagagacctctagagcgttcttgcgcggagtcgcgcagacgcgtctccatcagggcgctcgcggcgtcgcttgtgtagcgtctacanngtggcagagccgtcgatgttctcaccaccactacgaaagaaggatgagatgatcttttatgncgttttcttctcggngcgcgcgcgggtccgctagacgtcatagcctata

SEQ ID NO: 13130 - DNA, 293 bp, Glycine max
  misc_feature (98)..(98): n is a, c, g, or t
  Coding DNA Sequence Number=SeqID_3351
agatgtgtagagatagcaacgattcatcatccattggattcactcagaagatctatttgctcttcttctcatcagagttggccgaggacgcttcatcntcaacatcttctaattcacaacacatccaaatggaccttttgttgattatcagacctcatgagccacctccctattaaaagaggttatctatggtctatcaaggaaaggccagtctttcccttctttacagggtggaagacataaaaacttccaaaaaaggcccccttatagaaggaaaatgaatcttgcaaagt

SEQ ID NO: 13131 - DNA, 382 bp, Glycine max
  Coding DNA Sequence Number=SeqID_3352
ggacatgacctatggtgtcacccggcgccgcctcaccggacattctcacttcgtccaggacgtcgtcctctcatccgaagtgcaccatcgtgctctccggatcctgggacggcgagctccgcctctgggacctcgggggtgtgacctctgcccgccgcttcgttgaacataccaagtacgtgctctcagtgtcgttctccatcgaacaccgtcagatcgggtcggcctctcgtgaccgcacgatcatgctgaggaacaccctgtgtgagtgacagcacgcgataccagatggagatgcgcattcagtattgagtaagattgcgccgtttctgacctagtactcttcagccaaaacattgtttctgttatctggtaccggtac

SEQ ID NO: 13132 - DNA, 551 bp, Glycine max
  Coding DNA Sequence Number=SeqID_3353
gagggtcatgtgtctgttgaaagaatagccaactttaatgtcgggaaactgggtaggctttgggagtcagctacccgagctgtaactaaaggtgcccgtcaaattcccgacccaccatcagacccagaggatgaagacaaaatggatgataaggaaccaagaatatatgatcccaaaacaatgaaggatcagtatggtaactatcctccctggatgaacaagaagaaggtgaaggcaaagtctcacgctgccaaagttcaaaaggccaaggataagcgagtagccaggaggaagtcaggaagggtgctccgtaaagacactgatggacaaggaaagaaaccctcatcaaagaaaaatgatgatagtgatgagagcgatatggaggttaattattataaataacaaatttattgtaagatcacatgtgggctaggtgtccagtatttcttactggttgcctgacaagaaactacttgttcatcagtgatagataagaaatgtaatttcttcatagtatttactgttactgactgaccttgagcatttgtata

SEQ ID NO: 13133 - DNA, 523 bp, Glycine max
  misc_feature (147)..(147): n is a, c, g, or t
  misc_feature (289)..(289): n is a, c, g, or t
  Coding DNA Sequence Number=SeqID_3354
ggaaattaagctctctctaccttggggtaaaacctgatccaataaaaagtaacatcaaagacaaaaacagcaacagaaatctaaactattaagaatagcatgataatcatcatcatatcaggaggatggattggggggggggggggnaattccctctgaaagacccacagcaacttcaacatccctaaaggaagttcgagatagggctttttaatttattatttttctttaaccctttgttggctgggccttgccccctgactatatttgtttgccagtgggggaactnatgaaaacaacttccagcggcttgctaaaatcccctatgtcgcagctcatcgaaataaaatgcaggattctgcatgttgtcctaaacttttctggaaatccaggtgcctggaactaaacactttgtgtcttaggggaaatgccatgcggcttccttatctgaacaaaaaatcttacccagaatcaacaaaacccccgctcctttggcaagtgacatctcattgggttgcataaa

SEQ ID NO: 13134 - DNA, 573 bp, Glycine max
  misc_feature (403)..(403): n is a, c, g, or t
  Coding DNA Sequence Number=SeqID_3355
atatcatttacttcacgcggcgggcgcgggcaggattagcggggttgaaaattaccaccgcgtgaggatacttgtaatttccatttgttcgtcttttgttcaaggggggcggaggcggcggcgtgccgaacacgccggcattataaaaaagggcgcgagttacagatatattaaaatataataaagcgcgtcgggaatatatatagagagatacggggcgtggattgtgtgatattaataaataatgtgaatggagtaataaatagatgtatccgttcggtggttcgctattttattattatagcgttgcggtgttagagttattgtacgccgcgaatttatggtggatgacacggtgtgggggaataataagagggaaaagatgcgggtggtgcggggcttnacgcgtcccacataatctctctaatacaaaagaggcgggggagcggcggaaacaagtaagagatgatggagataaagatagggcgaataggggcactaaaaaaggtcaagtaacaaggcgagagagagggatacacgggtggtcaaaaatatgccaacggtcgctaacac

SEQ ID NO: 13135 - DNA, 567 bp, Glycine max
  misc_feature (46)..(47): n is a, c, g, or t
  misc_feature (56)..(56): n is a, c, g, or t
  misc_feature (147)..(147): n is a, c, g, or t
  misc_feature (187)..(187): n is a, c, g, or t
  misc_feature (234)..(234): n is a, c, g, or t
  misc_feature (413)..(413): n is a, c, g, or t
  misc_feature (421)..(421): n is a, c, g, or t
  misc_feature (507)..(507): n is a, c, g, or t
  Coding DNA Sequence Number=SeqID_3356
taaccactacacactaatcgaacacatgactatgcaatatcacacnnccaccaacncccacaacacagacaccctactctcatatcactgatacatactcacgtgccacgtcgaccgccagcgcccgacgcatcgctcggcgcagcncgcgaccacctcgcactaaaacgacgtgcgcgatcgcgantactggctcgacgatcacattcagtgaagctctagtcatcatataanacattattgtgtgtctgccgtagtccctccacacatcacgccgcatgacactctgacgatgactatctgattattctactcgcgtctctgtattaatatatacagagaaacgacacacaaactctcacacacacaacaaccaacacacacacacaccaataagtacatcacaaacgcanacaacacngcgacactcacaccacacataacgacgtgcgctataacgtcttctactcgacacgtgttgattactgatagataatacaaaaccanatcgtcgccgctgttcataatacagacgcgtcgtcgtcagcacgactcccacgtatagat

SEQ ID NO: 13136 - DNA, 594 bp, Glycine max
  misc_feature (44)..(44): n is a, c, g, or t
  misc_feature (115)..(115): n is a, c, g, or t
  misc_feature (121)..(121): n is a, c, g, or t
  misc_feature (142)..(142): n is a, c, g, or t
  misc_feature (157)..(157): n is a, c, g, or t
  misc_feature (195)..(195): n is a, c, g, or t
  misc_feature (255)..(255): n is a, c, g, or t
  misc_feature (337)..(337): n is a, c, g, or t
  misc_feature (354)..(354): n is a, c, g, or t
  misc_feature (397)..(397): n is a, c, g, or t
  misc_feature (400)..(400): n is a, c, g, or t
  misc_feature (406)..(406): n is a, c, g, or t
  misc_feature (414)..(414): n is a, c, g, or t
  misc_feature (467)..(467): n is a, c, g, or t
  misc_feature (472)..(472): n is a, c, g, or t
  misc_feature (477)..(477): n is a, c, g, or t
  misc_feature (505)..(505): n is a, c, g, or t
  misc_feature (510)..(510): n is a, c, g, or t
  misc_feature (536)..(536): n is a, c, g, or t
  Coding DNA Sequence Number=SeqID_3357
gtagtcttatactctgcatcatctgcactgcgtccgattaactngacatcatagatgtactgcatatagtacgcactgcattctacgacagtcatctatcataatgtgctagttnatgtanattcgtacacggtctgacgcnactcagtatagacantagagaaatgacatatctctactatgtatcaacgtgcntctaacgtcatgactcgcgcgacagctcatctctacacgattgattactgtgcagtcatntactacccgagtcgcacacgcagtgatgatagtatacatgtatgataccttgtcatcgcgatatcactatggtcgtacattncactctgatgatggcangatgtgatatatgactgtgagcaccggcagcgtgtctgctgantancaaagnatgtgagncgtcgagtcgtactgctagagcgatctcatgctcactctcgtgaccatgtctntacangtctnctaacacagcagatgatgaacatatatnagttngtactgacgcacgatgagtagatgantagtgtgacgactatgatctcacgacgtcacgcatgcgcgacgagcaacatgctgtaa

SEQ ID NO: 13137 - DNA, 593 bp, Glycine max
  Coding DNA Sequence Number=SeqID_3358
gactcgtgagtctgtgaggagatataccacaatatatactcgcgcgggcgcgacatacaaaataacaaaaaataataggggataaggaaatacccataaagagaaagcaggaggtagtgcggggtagacgactacctaaaaatgccagatccatttgcgagtgagcatcggggtgctctctagattacataaactatcggcgcgattatgaaggaagaataggtggcgggagggggggagaatataagtataaatgaaataaggagaaatcaccggtataatagaccactagacgcgccgctacaataaattgtaaagaaatacaggggcggggggcggggtgggggggggggataaaatatatatatgtagaccaagatgctttgtggacggtgcgtggatggggattattaggatagcgaggacgtaaagcaaacctaaacccgatgttagggcggcggggcacgcccgcccatcccacaggttcatttcagcagagtttggggcgatgagaagggcgagacaaagaaagggcgggggggttgtggtgtaaataaaataagaaatataagctgtttgttgcaacacgtata

SEQ ID NO: 13138 - DNA, 512 bp, Glycine max
  Coding DNA Sequence Number=SeqID_3359
atcttcagccggattgataaagccttcatcctctgccctttaaccaccccccacatcatcattggcattgacgctatcacccccatcgtctactgcttcgccccgatccctatccgcattgccatctgctccatctcatcatcaggctggctcttcctcaccgacaccctctgcccctatacctgccccacgctacaaaccgccatcatcctcataatcagaacctaaatacgcttcatctgggatcgatgctcccggcgctttgtagctacctagctgatgtgggtagtggcttgaactagttattatattttgtgcttttgtaactcttgacttcctggttagatcagagtgatgctcagctttagtatattactttgcactgaattctaatgttacaacttgtgttttggtatatagcattgggtaaagatgttcaattaattttatatgccatcaagtagttcgtggagtatgtatatagattgttttagtgcgttctaattgctatt

SEQ ID NO: 13139 - DNA, 545 bp, Glycine max
  misc_feature (385)..(385): n is a, c, g, or t
  misc_feature (434)..(434): n is a, c, g, or t
  misc_feature (508)..(508): n is a, c, g, or t
  Coding DNA Sequence Number=SeqID_3360
atattctgtctctcacaactactaaatcctgttatacactcctgtctctattttcactcccacctctaactcccataacacaaaacaaacctcctttacgccactccatcctctccgtctatctcttcatagctcacacgctctctcacgctcttctctaacctctccgtctctcctcgcaaacacacataacacctcgataacttatgcaacatatcacacacccatactcatccgcattacaatacagtcttccacacactctccctgctggatactctcacttctctcctattaccctattctcttcaaacactcctatacttcactacaatacgagtatgcatttctcgctctctctcttccatctgctcttcagtccccnctcacgccccgaccatacatatccctctctcatcttgcgataacaccanaacctcgttaattcatgtcttatcatagtaccaccctgtcttcctctacacaataccacacttatcacacacantatcgtatctccatcacactgtatctccactatagac

SEQ ID NO: 13140 - DNA, 499 bp, Glycine max
  Coding DNA Sequence Number=SeqID_3361
ggtaaaatcataattccacttatctaaagagaaattattataaaatgcaaattttcgttaagaccctcacaggaaaactatcacacttgatgttgagccttcagactcaattgaaaacgtcaaggccaagatccaagacaaggagggaatcccaccagaccagcaaagacttatcttcgcaggcaagcagctcgaagacggcagaaccctttcggactacaatatccagaaagaatcaacactccatctcgtcttgagactgcgtggtggtatgcagattttcgtcaagaccctcactggcaagactatcactctcgatgtcgaaccctctgattcaattgaaaacgtcaaggccaagatccaagacaaggagggaatcccaccagaccagcaaagactgatcttcgcaggcaagcagctcgaagacggcagaacgctttctgactacaatattcagaaagaatcaacacttcatctcgtgttgagactgcgtggtggt

SEQ ID NO: 13141 - DNA, 243 bp, Glycine max
  Coding DNA Sequence Number=SeqID_3362
agccttcaataacttcagggagatgcatagtcactggggtgattctggattgacgagcgtgtgtaactgtttgcctagaggtgtacgtggcctcactatgtaaaggcatgagacaagacgcaggaccttggaatgtcaaaaagcagacttcgtgcaagatcaatgcaaacatctgatttgttacaatgaactcaaaagtggttaaaaagccagaagcttagggtgattggattctggaaaaaa

SEQ ID NO: 13142 - DNA, 373 bp, Glycine max
  Coding DNA Sequence Number=SeqID_3363
ttggaagcaaaagtacaccctatacttattcaagctggaagctcttagggtggtcaaaaatgtgggatcagcagccgtcgacgagactacagaggtaccagcaaaagtggaggctgcgccgagagggatcatgccacgacagctggagccaaacaacagttgcctgatcttatggggcagtaccggtgggctcctgcgcaaggcacaggtggaggagttatatgtattgactggtgactcatccaaagaacagatctttgaaatgcccactggtggagccgttatcatgagggagggtgctaaccttcttaagttggccaggaaggagcactgcttggctcttgggactaggcttaggtcctagtacaaaatc

SEQ ID NO: 13143 - DNA, 578 bp, Glycine max
  misc_feature (142)..(142): n is a, c, g, or t
  misc_feature (155)..(155): n is a, c, g, or t
  misc_feature (164)..(164): n is a, c, g, or t
  misc_feature (275)..(275): n is a, c, g, or t
  misc_feature (443)..(443): n is a, c, g, or t
  misc_feature (529)..(529): n is a, c, g, or t
  misc_feature (551)..(551): n is a, c, g, or t
  Coding DNA Sequence Number=SeqID_3364
gacaacgatcgtatcaaatctctcatatacatagttgcgaaccacgcgtcgcctgtgactacgacaccctacgtcaacgcaggcgatcgcatctccacgcgccagacgtccgctcttttataatgatatctatatcgtgatnatacaacgctatnttcagctanattgtgaatattgcgtatccagtctggagtaataatctactgcttaactccacacatacactatctatacgtttgcgccacacatgcaccgcacatccacgacgcccacgngctcagtagacgtacgtatctgatactaagcatcgaacggaaccataactacacatactctcaatattgaatgtaatatagattacacaacgcagatcaatcgaccattaatatcgccatactcatgctactgtatgtgtcttaacatatagagacatagagatatgnatatacaacagctatatgagactgatagagatgcatacagtgcacgcagagaagcgtatagtgatcagaacatacgtcacgtgtcnagcggcatcgtcctgggtactnacgcgcagactactcacactaacgaga

SEQ ID NO: 13144 - DNA, 518 bp, Glycine max
  misc_feature (489)..(489): n is a, c, g, or t
  Coding DNA Sequence Number=SeqID_3365
tcttttaactttctacaatgcccggaactattactttcagacctattgaagctaatcttactcacaacactgacattctcaccaagatgaatccttattgcgctttcatcgttggcaacaagagaatcaacagtgaaatctgcaagcacggtggcaagcactctcaatggcatgatgccgtcactgtccccttcgccaacgaagccaagatcatggtcgaagtcatggacaaggacagactcaccaaggatgaccatatcggctctttcatgatcgatgtctctgagctccaagctaagggtcaatccagcaagtggtaccctttgttctacaagaacaagcccgctggtgagatcttgatggaagccaacatccaaggtggagacatgatcggacaaactgacttcatccaaagagaagaagccatcatcaccgaacccgccatcatcgaaaaagaagaaatcatcgtcaaccaaaagcccatcgtcnaagaaggtgtcaagactttcgtcgaacaa

SEQ ID NO: 13145 - DNA, 596 bp, Glycine max
  Coding DNA Sequence Number=SeqID_3366
ctttatttgcccgtcgagcgtttgtttgcgggtcgcaaaggaattaagagctcgcaatgcagtttcttagcgggagcgagcaaagtgagctttcctaggccggtaggtcaagttagccaccttcgcaaacagcgccaaacgcgtcactgcggtgctgaccacgcgacttgcaccggtgacaagatcctgatcgcgaacagaggcgagattgccgtccgcgttattcgaaccgctcatgaattggggattccttgtgtggctgtgtactccaccatcgacaaggacgcgcttcatgtcaaattggctgatgaagccgattgcatcggggaagcgccgagtatccagtcctacttgctgatcccgaatgttctgtcagctgctattagccggagatgcaccatgtagcatcctggctatggttgtctatggggagatgcagggtctgttgaactgtgcagagaagctggaatcaactgtatttgggctgacactgaccgtattatggttataggggacggatgcactggcagacagaccatgaagtaaagaaggtatttccgctgttctcggagtgaaggacgtatgctaggcacagt

SEQ ID NO: 13146 - DNA, 519 bp, Glycine max
  misc_feature (270)..(270): n is a, c, g, or t
  misc_feature (287)..(287): n is a, c, g, or t
  misc_feature (294)..(294): n is a, c, g, or t
  misc_feature (393)..(393): n is a, c, g, or t
  Coding DNA Sequence Number=SeqID_3367
tgtaggagcgtatatctcaccacccgtaccagcactctcctacggtagccgttatctgggtatcggccgaccgtcgcactcattatcagtgcatctactacatccctacgccttacgtgtgtcgcgcactaacgctctcatgccctctatgacacgcattctatccccagtatgcagtctgcggatgcatagagactcgaccgccctctatctgctcgttctacacgccttcttgcaagattatcggtcacatgcgagtctgtgttgtcntcgttagggcacacgangcgatgntccaaccatcactcttctctatttagcctcatactcgatatattcgcactctctgccgcgctcgcgcgtcttcactctagtatcacgagtatctctatnataaatatatgtgagattcgttgacggtactaaacaatgccgcgacgtgccggcgaggggatacggtgatggagcatcttcttcaaaatacaggcgacgcctacacctaattcaccatgcgattgc

SEQ ID NO: 13147 - DNA, 497 bp, Glycine max
  misc_feature (115)..(115): n is a, c, g, or t
  Coding DNA Sequence Number=SeqID_3368
tctggtctcttactatttatacatcttaggccgtgtgtcgcacgctatcgccgtgttagaacgataccacagtagagatagacggttactactatttctatgcaatctgacgttntagatattgatggctgttacatctcccgctactcgcgggcgatcaaatctggtataattagattacaggagaggacgaggcaaagatgcgctgaggcagtacgtggtgcaacatgaaacgcttaggtgtgacgctgtagtactgagatatgagatgtcaattacgatgtcacagacggatccgagtaagtgaagcatagagagagaagcagcagaatgtgtaatagacaccgtgtcgacattaatactgttctctcgcgtcggcctacacgatgctcagctttctcacctatttgattcacagatagcagattctaatgtagtcaagtcggatatggtagtggctgttgtcactacttgtcctgactgagataaacttctgt

SEQ ID NO: 13148 - DNA, 571 bp, Glycine max
  Coding DNA Sequence Number=SeqID_3369
gcctcttccctaacaaagcgacgaggttgccgctgggccgacgcgatgtgggatccgtcgcttcgctcggtacgtcaccacactcgcccaacaaaagcccgcgagagcgagaggagaagggcgggaaccaggcgcaggaagggggaggagaagggcgggaaccagacgcgggaaggggagaagggaaggcgtgaatcaggggaaggggcgaagtagagtagaaggccgcgctccctcgtcctcagcccgtcgtcgacgccgtcttgcctgatctgaggcgcgaactagaggagaagccggagcaccctcatcctcagcccgccgtcggcgtcgtcctgctcgatctgatctgggtttgttctccctgtaatgtatgagattacttcttcccccatctcttactgttctcatggccagatgatttttggttcaataaactaggctagggtttgctgtttctggagatttgtggtgatacgatcagtagctatgttccaagaacggtattgatttccctatgctgcgattcaggctcaatctatgtggatcgggttgtaatgctcccatgtct

SEQ ID NO: 13149 - DNA, 277 bp, Glycine max
  misc_feature (247)..(247): n is a, c, g, or t
  Coding DNA Sequence Number=SeqID_3370
aaaaacagcttatcgaactggcaaccctccatgggggggcacgcctggcccatacgcgcctcataaggaccggtaacttacgcgcaatcccccagacatcgtcgtttatgaagccggggcggggaacaggtctcccacacccccacatcgtcccttctttgagcctcaatccccctccaccttcacccggccactaaaaaaaaaaaaaaaagagccccccccttctatccccctctccctcaaaaanttttccctctttgatcgggctattatattc

SEQ ID NO: 13150 - DNA, 237 bp, Glycine max
  misc_feature (82)..(82): n is a, c, g, or t
  Coding DNA Sequence Number=SeqID_3371
aagaaaatggatgggcttagccatatcggtctccctgttctgggaatactcgcagtctccgttgtcacgttctacgccgtcngcttcgctgagatcagagagaaatcgtttaaagatttgtacgactcggagaatggagagggagcagggttcaagacttcactaagttccagagagaggagattgaaaagagaagcaaataaaaaacgtcctcgttcttgaaacccagggtgatgg

SEQ ID NO: 13151 - DNA, 380 bp, Glycine max
  Coding DNA Sequence Number=SeqID_3372
tcaagctccatcccgatcgatagcggccaacgccgagccgaagcccgcggagaagaagcgggccgcagaggaagccgggaaggccgagaagacccccgccggcaagaagcaagagccggagaagggggcggcggcgtccgagtccgccgacgagggcggcgaccggaggggaggcaaggagaacaagaagagcgaggagacctacaagatctacatcttcaaagtggtcaagcagctgcacccggacgtcgccatcgcctccaaacccaggcccatcatgaactccctcatcaacgacatcttcgtgaagctcgccggcgaggcggccaagctgacgagggacagcaagaagcccaccctcacgtccagggacatccaga

SEQ ID NO: 13152 - DNA, 536 bp, Glycine max
  misc_feature (29)..(29): n is a, c, g, or t
  misc_feature (31)..(31): n is a, c, g, or t
  misc_feature (115)..(115): n is a, c, g, or t
  misc_feature (144)..(144): n is a, c, g, or t
  misc_feature (147)..(147): n is a, c, g, or t
  misc_feature (151)..(151): n is a, c, g, or t
  misc_feature (221)..(221): n is a, c, g, or t
  misc_feature (254)..(254): n is a, c, g, or t
  misc_feature (271)..(271): n is a, c, g, or t
  misc_feature (306)..(306): n is a, c, g, or t
  misc_feature (314)..(314): n is a, c, g, or t
  misc_feature (320)..(320): n is a, c, g, or t
  misc_feature (341)..(341): n is a, c, g, or t
  misc_feature (343)..(343): n is a, c, g, or t
  misc_feature (348)..(349): n is a, c, g, or t
  misc_feature (364)..(364): n is a, c, g, or t
  misc_feature (382)..(382): n is a, c, g, or t
  misc_feature (497)..(497): n is a, c, g, or t
  Coding DNA Sequence Number=SeqID_3373
gactagacagacgatcatgatggatgtanantgacgagctactgcatctgtcgcgcgtgctgtgctgctcatgatctcacgttctctataattagacacatgctgacgcagcganacacagcacacatggcgtgcatgctgacnacngatnatcatctaccactgagccagagatgtgacagctgctatgacctagatgccagtatacctgtattggagantgtcgaatcactatgctagcggtagtgcgagangacaagtatacatcaantctctgcgtacatgacgcacgacatcagtactccngcatcctngcgcgnctgtctgctgtctctctgtcnangtaanntatattaccagtcanatcactacactgtctctntaacatacatatctatcactcatatctctctgtactctctcatccaacgctgttcactactcatataatatgacactagcgagtgtgctgcgagtgttgtagatgtgacgaaaanatcaatacacaatcatactgtagtctatatctgcactag

SEQ ID NO: 13153 - DNA, 585 bp, Glycine max
  Coding DNA Sequence Number=SeqID_3374
ttctcacaggaatcagctatggtcatgattcgtcaagctggaaattaaccgtcactaaagggcacaaaacctggagcttctccccggtggcgacgggtgtaagcatagtggatccgccggaatgcagcaaatgagggaatgaggatgtctcgcaaatgttgtatgttggtcaagttcacaagcatatggcatgaaagcaatggaccgtgttatagtattaggataggcaacgtgtttagatgtcaatagcgtggaaatcttaatcgcgatccactccacgtatcatgagcaagacaactatctcatatctcctgttcaggttcagcaagagtgtgcgagatgtatattacacgcatgctcatggagtaagcagtcattagttatattccattacccccttccccttgtctttcagcttcggtaactctcttaaagcttcaacggggagacttgcaacttgcggtctcccgaatgtcaggtaagttaaccctcatagaacgggttggtttccaattcctcgacaagggtggagggaaccgtagaggggccacctcgctatagattgattagcccacgttaatgttt

SEQ ID NO: 13154 - DNA, 501 bp, Glycine max
  misc_feature (457)..(457): n is a, c, g, or t
  Coding DNA Sequence Number=SeqID_3375
gagtgggctgcgatattttctgcttaggagtcagaggggagctatcagtgcactattgcggcagagagccggagccggggtgtgcgcaggcgagaggggagatgaaagcgtgtatataacgaatggtgtgttgtaatgagggatctaagagagggtcggtagtgagagtgtggggtgcgcagtgggaggcaaggagaacaaaggtagcggtctgcatgtggggtgggagagaggacgtgccgagcactctatgtgtgatgcgtataaggaggtgaaattaaagggtgtggtgtgctgtcggtgatgtctccgtcctcgtacttaatatatgcgaaagtcgaaatagatgggatggctgtgatcggagtgagcagccggagaagcaaggcgagggagtctctctcaactaggttcgtgggtgaggaggtaggaacaagtttgtataggtgggcgcgcnccccctctccatctggaggaggcttgcccgatagtttgtggtgt

SEQ ID NO: 13155 - DNA, 398 bp, Glycine max
  misc_feature (66)..(66): n is a, c, g, or t
  misc_feature (119)..(119): n is a, c, g, or t
  misc_feature (199)..(199): n is a, c, g, or t
  misc_feature (317)..(317): n is a, c, g, or t
  misc_feature (319)..(319): n is a, c, g, or t
  misc_feature (353)..(353): n is a, c, g, or t
  misc_feature (370)..(370): n is a, c, g, or t
  Coding DNA Sequence Number=SeqID_3376
aatacatcgcagaccgacgtcacagttcctaactcgcggctgcttccacacactcctcgagcgacnctgaagctgctgctcgcttagtgcgctgtgtcgtcgttgtatcaggccgcgcncagccctttttcttctgtgtctcttcatatctttcctactcagcgcctcctcacatccctatcatacacacaccctcagngttgatatctattcatatataactacgcatcgatatttctagtgtgtgttgtagctgtatacagatggctaatcgcacatatcatacgtatagtgtcatgttcatacacacacagacnanacatcacgcgccacgtatccttctatcggtcttncgtcgccgtccatctcntgcacacacctcacatcttgcgtagcgt

SEQ ID NO: 13156 - DNA, 197 bp, Glycine max
  Coding DNA Sequence Number=SeqID_3377
agaacggtgaaggatttagcaaacagtcattattaaacagagtatgacactgctggattcgcagtcccttttctccatatcaggtcgcttggactgcagcgggtattgggtgaaggtgatgcttatgctagtaacaatatgaatgcaagctctgctcatgtcagtcgtatatacttcaccaccattggtctcaatcg

SEQ ID NO: 13157 - DNA, 374 bp, Glycine max
  misc_feature (51)..(51): n is a, c, g, or t
  misc_feature (85)..(85): n is a, c, g, or t
  misc_feature (216)..(216): n is a, c, g, or t
  misc_feature (247)..(247): n is a, c, g, or t
  misc_feature (251)..(251): n is a, c, g, or t
  misc_feature (253)..(254): n is a, c, g, or t
  misc_feature (262)..(262): n is a, c, g, or t
  Coding DNA Sequence Number=SeqID_3378
gttatacaatagagcgggcgcgcgcggccgtggacactactgcatactctncacatcgtcggtgttgtgttatttctgatgaganatatgtgatgatagtttaatgttgctgggatgatagtcgctctatacagctagaactctttcgccgggtctggttgctctcagtctacacatacgacgcagcgatctaggcgtcgggtgttggtgtgattnatgtgtatcataacattctcttatgggctanaganannaagtaagnaagtagatgtgtgatgagacacgcagtgccgtgtctgtagtaattcatcatctcttatattcgtggctgtgtctgttgaatgtatgagatgtgcggcgaatttcggtcctaa

SEQ ID NO: 13158 - DNA, 524 bp, Glycine max
  Coding DNA Sequence Number=SeqID_3379
gcttgataatgaagagcctggcctctataaagtacatgttagatgggataaagatcctacaagtataaaggaagatgatgaatggctcagaggccttaaagcagcggcttatttccctccgatgtttgaaataaatggagatccttctttttgttcacatccttgttatcctacagtgcagcagcaaatagcaatttctgcatcctatggtagcgaagatgcttatcagcttcttgttattcatgctagttcaggagatgttcgtgtaactcatcctatttttcaagattatccgaaatacacaggaacttcaataggctataggatagcttttcccaaaccagaaagatggatagcaactgacgaagaacttattacctttgaagatatgagtaaaaagcaaattgatcaaaactttaagaagttatataatttgctttggtctatgcaaccaaaaaaagaagagaattcctagtgatagtcatctttatcctaaatatgcgtgaatgccgagttatgtttat

SEQ ID NO: 13159 - DNA, 513 bp, Glycine max
  Coding DNA Sequence Number=SeqID_3380
cacgcgtacggcacatggtaactacaaacctctctctaaacctcaaactctgattgttcaacggaaagcccgtcacatattcttcccgcgtcgagcccaccaccaaattatactgatcacaaacaagggacaatatccatgtccctataccaaccccactactacctacagtacttcaaattacaatccatcaaagaatgcatagtgacacgggaaatgacgagccgctacatgaccgacatgataacctacgccgacaccgacgtagtaatcgtcggagccgtctcgggcgggctctactgcacgtacaagctcagcaagaaccccgccgtgagcgaggacatagtgaagcactcagtgagccccggcggcggcgcgtggctcttctggcagatcttgtccgcgatggtggtgcacaagctggtgcacctgttcctcgacgagctcgacgaggcgtacgactagcaagaggactacgttgccataaagcacacggctatgatcacgagcacg

SEQ ID NO: 13160 - DNA, 577 bp, Glycine max
  misc_feature (432)..(432): n is a, c, g, or t
  Coding DNA Sequence Number=SeqID_3381
ggctatatgaccagttttccgtgcttcatcttaatcctatcctacactcctctcgtctactacactcaccattctatatttatatatagcacgtctaattcataatatttatatattataaaatatataagtatactatctatcatggtttatttgtttacgtcagtttgtgttttctgagttctatgtctcttagtcgagtgttatgaatataactcttttctagtcgaataattatagaatggcgcagagtacatgtcgcgaaccgactgcgcacggacgcgcgagcggcgcgcgcacgatatcggccggcagcacacttatctctcattatcctccagtagatatgataaatgtgcttcagctttcgtcggccgcggttatcactgattgatttctctaagacaattaatctaaatcttattcaatatnaagcgcgcacgagcagccgctcacaacgctgcaactatcttatcttcgaacataccacgttcgccggcttcatgcctgagccgcatgccatccgaggacgcgttgacgtggtgctagtccgatttcactgacacgtcacggccaa

SEQ ID NO: 13161 - DNA, 590 bp, Glycine max
  misc_feature (87)..(87): n is a, c, g, or t
  misc_feature (124)..(124): n is a, c, g, or t
  misc_feature (299)..(299): n is a, c, g, or t
  Coding DNA Sequence Number=SeqID_3382
atgtctatctatagcacgctcacgtcacatatttgcagttgataccacacattatctctgtgactgcgcgcgctagtgtcttaatcntacatcataacattctactctgctcttctcttgctgntactaatcgaatgtttacgatatgtatgcattgttagactgcgtctgttgtgttaccatcatgtatgtatcacaccacacgtcttgatcgatgtctacatgcatatactatcgtcagtcacgactagctcctctgagctcttgcgatctcgcgttgatactatactcgatactgntgcgacggtatcgatctctgccgtcctcgaagacactagctatcgccgcatctcatgacagtatagtgtgagagcatattattatatatactctcatcatctcgtatctaatatagctgtttatattgtctgtcgtgcgcggtcgatttaatcctctactagatcgacactatacttgctctctctcttctcatttcatcgctctgctgctgtcgtatcgtgtcttatcacgtctctgcatatatatatgtatgcacaacgtcgtctatgcatacatctcagtccgtcaaa

SEQ ID NO: 13162 - DNA, 553 bp, Glycine max
  misc_feature (99)..(99): n is a, c, g, or t
  misc_feature (151)..(151): n is a, c, g, or t
  misc_feature (153)..(153): n is a, c, g, or t
  misc_feature (157)..(157): n is a, c, g, or t
  misc_feature (160)..(160): n is a, c, g, or t
  misc_feature (252)..(252): n is a, c, g, or t
  misc_feature (254)..(254): n is a, c, g, or t
  misc_feature (325)..(325): n is a, c, g, or t
  misc_feature (357)..(357): n is a, c, g, or t
  misc_feature (371)..(371): n is a, c, g, or t
  misc_feature (420)..(420): n is a, c, g, or t
  misc_feature (430)..(430): n is a, c, g, or t
  misc_feature (447)..(447): n is a, c, g, or t
  misc_feature (449)..(449): n is a, c, g, or t
  misc_feature (492)..(492): n is a, c, g, or t
  misc_feature (518)..(518): n is a, c, g, or t
  misc_feature (525)..(525): n is a, c, g, or t
  Coding DNA Sequence Number=SeqID_3383
attatagtatagatgcacgcacgtcattggattgctctgatgagaatgcgacatgacagtgtgagtcgtgagtacagagaataccgacatgttacacgntggatctataggctatagttacttaatacgtccacatagttctcgtttactnantatnganatcagtactaatggtgacaccctccccacccgcaactcaactccgaacgtactgtgatagaagagtgagttcctggagatacagaggatgananaagatgtcttgcgaagagcaaccaacaactcctgatgtacactgacgcgtagcgtggtgatcgactccggncggcactcgtgcggcgcctcagccgccgcgtncagtcgcggcgcgngctagacgacacctgacttggtgagtacatgtatgtcataatctatgtnctattttctnatttatattgtgttcantnctcttctgcacctgtactcctacattcagtcatacacgatccntctttgtcctgatacgctctgcactntggtccntatatctctacatattgcgtgacatcca

SEQ ID NO: 13163 - DNA, 461 bp, Glycine max
  Coding DNA Sequence Number=SeqID_3384
aaggattcttattcgttctctctcttttgcacgccattacataaagaaagaaaagctcatcggtttctcagatccacttcttctttggttaatctctagggattttctgatcgctttgtttggtccgagccatggcttcgaagaggattttgaaagagcttaaggatttgcagaaggatcctccttctaactgcagcgcaggtccggtggctgaggacatgttccattggcaagcaactatcatgggacctcctgacagtccttatgctggaggagtctttttggtttccattcactttcctccggattaccctttcaagccaccaaaggtgtcttttaagacaagggtgtaccacccgaacatcaacagcaacggaagcatttgccttgatatcctgaaagaacagtggagtcctgctcttaccatatccaaggttttgctgtcgatctgctcattgctg

SEQ ID NO: 13164 - DNA, 520 bp, Glycine max
  misc_feature (138)..(138): n is a, c, g, or t
  misc_feature (149)..(149): n is a, c, g, or t
  misc_feature (195)..(195): n is a, c, g, or t
  misc_feature (221)..(221): n is a, c, g, or t
  misc_feature (281)..(281): n is a, c, g, or t
  misc_feature (292)..(292): n is a, c, g, or t
  misc_feature (301)..(301): n is a, c, g, or t
  misc_feature (393)..(393): n is a, c, g, or t
  misc_feature (437)..(437): n is a, c, g, or t
  misc_feature (445)..(445): n is a, c, g, or t
  misc_feature (454)..(454): n is a, c, g, or t
  misc_feature (464)..(464): n is a, c, g, or t
  misc_feature (469)..(469): n is a, c, g, or t
  misc_feature (479)..(480): n is a, c, g, or t
  misc_feature (482)..(482): n is a, c, g, or t
  Coding DNA Sequence Number=SeqID_3385
atgtatgttatgtatcgcacgctgagagtgagagatactaaaccagccaactactgctacgagtactatatatctgttacttcatcgcctatctagtgcgcgcgcgacatccatccggcacgtaactcattctctgtngcagtgtgctngatgcactcaccagtaacacacacatcaacgttactgatgtctcanaacaatgacctcgagacgtggcgatncgcgcacgatcgctgcgcagcgaatgacatacgcatatcttacacgcgcactcgcatctnaccttctcgcncagcgcagngacatacaagcacacaagtatcccgatcatatgaacatatgcataactcagaagcacgattcacttatccgcgctcgagccttgtcgacacntcacatacactagcaacagtacatgtgctcatgatggcgcacgnccgccgancaacgacgncggcgcaccnagtangtgcgctgtnngnacgacgcgtagctcgagatgtcagttcgcgcagtgagc

SEQ ID NO: 13165 - DNA, 258 bp, Glycine max
  misc_feature (165)..(169): n is a, c, g, or t
  Coding DNA Sequence Number=SeqID_3386
gctattggactcaatggagattgttgctgacaatattgattaccagggttgggatgatccttatataccacgtacccatgaaggactcttgaagtggaaatatgcttatctgaattcagttgattttcttttcgaggtacaggttgatggtgatcgtgagctacnnnnnctcaatgagcggggaaagaagaaacttttggaagggaatagggttgaattcacagacctatataaacccgaaaattataacacacgcat

SEQ ID NO: 13166 - DNA, 419 bp, Glycine max
  Coding DNA Sequence Number=SeqID_3387
cacacagaaacacaaacctgagcatcgctcgttggttgagattggtgtggcttccaatggagagctatgcactccactctctctcaacctctttctctcgcttttctcagctccatcaccctcctccccctgtcatctccagatccccattcaaccaatctcactctctctctctccgatcaccgcatcacaatctcccaacgtttctccttcccctcctccaccttcaaattccacccctttcccacagcgcccattaccctaattcaacgcttctccttcatcactttcacccttcaccaccattaccccctattctcgggtccaatccccattccttttatattctacctatccatcggcctcatcgatcgaatttttggtccgcacccccgaacaccaattttcaccgcctgcca

SEQ ID NO: 13167 - DNA, 262 bp, Glycine max
  Coding DNA Sequence Number=SeqID_3388
tccatcggagaacctaagggacagctcccgtcttagcagcccaatggcagcggccaccatgtccctctcctccccggccttcgccggcaaggcggtgaagaatgtgtcgttgtcggccctcttcggtgaggcacgcgtcaccatgcgcaagactgcggcaaaggcaaagcaagttgcttcgagcagcccgtggtatggtgccgaacgcgtgctctaccttggcccactatcaggtgagccgccgagctatttgaccggtgag

SEQ ID NO: 13168 - DNA, 548 bp, Glycine max
  Coding DNA Sequence Number=SeqID_3389
atgaacggcgttccatcaaagcttcttatacgcgcaatgtgcagaacctgcattttttaagcaataccaccaccagcagtcctaccgacctctggttgcccagcaccaacaatgttcaacccgaaacagccgatcagtttgccattggttattatcaaacctcagcgaacgatcaatacgaactgacggttgaaacttattacaaatggatgcagcaccagatcgactataaaagcggagccttactcagggccaatgataatgttgaaaaccagttattgtacggtgtgggcagggcttatggtattgaatggttgctccgaaaaaaatatggcaggctgagtggctgggtgggctataccctctccaaaacggaacgccgcttcgaccagatcaacaacggacaatatttcccggccaggcaggatattacccatgatatttcgttggtgggtatttataaattatctgaccgatggacactctctggcacctgggtatacaacaccggcaacgccgttacttttccttccggcaaataccatgta

SEQ ID NO: 13169 - DNA, 152 bp, Glycine max
  misc_feature (56)..(56): n is a, c, g, or t
  Coding DNA Sequence Number=SeqID_3390
atgatatgaaaatggtcacgaaccttggggatatttcttatattaatcgtaacctntgtgtttgtgaattggaggttgctaacttgtcagattggctgcatggtggaaattggttggcacgtgacagaatgaagacaggatgtgtagctcta

SEQ ID NO: 13170 - DNA, 506 bp, Glycine max
  misc_feature (61)..(61): n is a, c, g, or t
  misc_feature (105)..(105): n is a, c, g, or t
  misc_feature (156)..(156): n is a, c, g, or t
  misc_feature (239)..(239): n is a, c, g, or t
  misc_feature (394)..(394): n is a, c, g, or t
  Coding DNA Sequence Number=SeqID_3391
gtaggcgacgactgtagcttccggtgctcactcatagggtatcgagtgtttaaggagcctntagctatcgagggcgtgcttgattttgagatgaggctgctgtgngccctagaccaacgataatagcttgctcacgctatctgaggtatgtctagntgcttacattatagcatcttcgtggtgttgcgtaatataaggtatagagatagagcgcgaggttgatgttgagtgtatggcgntctacaggacgatgcgtcttatttattatttagcatagtcaggagagagacgggtcttgtctctgggcgagtgtgtgatacagagcagatgatactatactaattaaggataagatgagagatggggtagtagcacgtttgttttcgtagatagncgagaagagagagagaagataaaaatgagcagcagctagctcctcttcactagacccctcggagaggtgatcgtcttcttttgtttatttagataggcggacctgtccctcc

SEQ ID NO: 13171 - DNA, 591 bp, Glycine max
  misc_feature (32)..(32): n is a, c, g, or t
  misc_feature (140)..(140): n is a, c, g, or t
  misc_feature (153)..(153): n is a, c, g, or t
  misc_feature (162)..(162): n is a, c, g, or t
  misc_feature (167)..(167): n is a, c, g, or t
  misc_feature (247)..(247): n is a, c, g, or t
  misc_feature (253)..(253): n is a, c, g, or t
  misc_feature (270)..(270): n is a, c, g, or t
  misc_feature (286)..(286): n is a, c, g, or t
  misc_feature (345)..(345): n is a, c, g, or t
  misc_feature (352)..(352): n is a, c, g, or t
  misc_feature (378)..(378): n is a, c, g, or t
  misc_feature (411)..(411): n is a, c, g, or t
  misc_feature (469)..(469): n is a, c, g, or t
  misc_feature (500)..(500): n is a, c, g, or t
  misc_feature (536)..(536): n is a, c, g, or t
  misc_feature (551)..(551): n is a, c, g, or t
  misc_feature (556)..(556): n is a, c, g, or t
  Coding DNA Sequence Number=SeqID_3392
acggcgaaagcaacgcggtgacgatgagcgangcacgcagcacgcactcacacacgccacacacgctcgcagatgcataatactatgtatgggtcgagcacacgatgtctgcagctgcaccgatagaataatagctgaancatagatgcgcgnatccgacantaganacacagacaacagcagtagagataccaccgcgaccacacaccgaacggacagcgcagtactaagagacgcggggtcgtgncgaganacgagcgacagcggacnagacggctgcacgcgncgaaatgacacgcggacgccgccagcgcgcgctgacatgcgtcatgatattggagtgtngatccgncgcgcggtcgcatgcccgtgagaacngagcacacgcacgacacgacggcatgccggccnactgcacggctcgctacgatcgtcactgtgagcgactatcggccgagtagctgcgcgntgtagagcaggcgaaacaggtattgaattgngcttaagtgtcgagagtcacgccgtgtgactgtggntaatgacggagcgtngttcngtgagctagttcgtgtagagctggtgcgcgatcac

SEQ ID NO: 13172 - DNA, 503 bp, Glycine max
  misc_feature (332)..(332): n is a, c, g, or t
  misc_feature (462)..(462): n is a, c, g, or t
  Coding DNA Sequence Number=SeqID_3393
gatgcgtgcgtcgtagacgcgtcatagtgtcggcgagctatgtacaacagatacctcattctatactcgcgatctccgtatctgctcttcatatatgatgcgatagacgagagcgagcatcacgccacagagtactaggtctatatctattgatcacatagcaagcaactgtcactacacttctgttcagaacatgaccgcagctcgcgatgtccctgcgtgacgtcgtagaccgatgcacaagacgcgcgagcgagtacgggacggcgacttacctgtagcaatgatgatgtgatgtgcgagtagtaggatacgagcgagatcaggagacntgaggtgtgcatatgtaatactgatgagaatatatgaatacatatatgtatagagtaattagcttcagtcatctagatcatactcattcatatatcccttgctagcgatgctgagagcgcggtagcgtantcatgtctaactctctgtctcatatatcttacacgctcaca

SEQ ID NO: 13173 - DNA, 149 bp, Glycine max
  Coding DNA Sequence Number=SeqID_3394
cgttgcagatccctcattgtttaatgggatgaaattggtatggattccatagtcggattgcctcgcactctatccggctactattctatttgagtagtggtggaaccgtttgaccaattcatcccacttcatacctatcaacaccaact

SEQ ID NO: 13174 - DNA, 572 bp, Glycine max
  misc_feature (32)..(32): n is a, c, g, or t
  misc_feature (108)..(108): n is a, c, g, or t
  misc_feature (115)..(115): n is a, c, g, or t
  misc_feature (185)..(185): n is a, c, g, or t
  misc_feature (195)..(195): n is a, c, g, or t
  misc_feature (236)..(236): n is a, c, g, or t
  misc_feature (330)..(330): n is a, c, g, or t
  misc_feature (372)..(372): n is a, c, g, or t
  misc_feature (393)..(393): n is a, c, g, or t
  misc_feature (398)..(398): n is a, c, g, or t
  misc_feature (402)..(402): n is a, c, g, or t
  misc_feature (464)..(464): n is a, c, g, or t
  Coding DNA Sequence Number=SeqID_3395
gcacgcagcgcgaatagtcgacaatcatcgcntgccgccacgacgatgagacacatcacatcacgcatgagtatcgcgtccacgctagctactaatatgatgatgagngatagtngcactacctcatcacccttcgacgactgcgtacagtgaccatgactgtcggtgctcgacatggacacgtngacgtcgtcngcgtgacgatagcgagcatcgtcccggtataaagcaccgtnatgcatcagctgtccgcgccgctgcacacctctgtaccacgctctcatactcgccgacactcttgcgaccgatctgctctcctcgctcatcgtnagcgactatatcacgcaagctcatccatcatgccactcagantacactctgacctaaactcanacacnatcnaccatagctcgacttatgtatcactcacagacacactactatccacgtgactctaacaaatnacactacgctctacatgataacatgcgcacacatcccatactatcctaactgctatatcacattcatcatcatctgacactgcacttcacatctatcacatctcgact

SEQ ID NO: 13175 - DNA, 363 bp, Glycine max
  Coding DNA Sequence Number=SeqID_3396
gaagcagtaggctgttcaagaagaagaagaaatagttcgatggcgatgacattagcagcttcgtcctctgtggtagtgatgattccacgtgtctccaccgtctcttaccttcctccgctgcctcctcgctcttttggtcgatcatctttcactgttcctctgaagctagtttcagggaatggtttgcagaaggttgaattgatgaagacgagagcttcttcatcagacgagacctcagcgtccattgacaccaacgaactctttaatgacttgaaggaaaagtgggatggtcttgagaacaagacgactgtggttatctacggaggaggagccattgttgctgtttggttatcttccattctt

SEQ ID NO: 13176 - DNA, 551 bp, Glycine max
  Coding DNA Sequence Number=SeqID_3397
tttccttcttatactctctacacattttgctccctctatcaagatatactaacacctacacctcctccacaatattccattacaaccttcacaatctttctatcttcttcactcactactatcttatctctctttccctctctctcatttatttcttattacatatctctttcctctcatatcaagatctatatattccttacacccccaccaccatcactcctcactatcttcctctcacttatctactcctcgtcactcacttaggtttactatatccaaaactatcatctttttcgccttctacacactatatcttacatccttatcacactaccctcccatattgtccttcctctacccctatcttctcctcctccacccttattactcctcttctctcctccctctcctttttcttttttgggaacaaaaaatcctcctttcctcatcctctccatcatcttacactaattttcccccctctcctctttcttgtgcacactactctctctcccccctctcctctttttggaaaacacctctcctct

SEQ ID NO: 13177 - DNA, 565 bp, Glycine max
  Coding DNA Sequence Number=SeqID_3398
ttctcttgggtttatgctgcttcagaatgttatgatttccataacctgattaattgtgcgtttgttatttctgcacccaaaaaaatcaagtgtcacccgtgtcacccccttctattccagaataaaaaggtgtgcacttgatttttgttgagttgttgagtgcaggaagaaacacccttagtatgtcttaattgtctttttttaattcaatcattatttcgggccaagcccactttagagcgtatgatagatacacatataaaactctgaaactttcctatgtcgtcctaacgactttagtgcataaacaacaagacagcaggaaattagatcttctattgctgtcgattaccaatttgccgatacactggggcacgttcagaaaactacaccactttcaaaaaagacatgtcagtactgaacatccaattcaaaaaaataaaatcccttcgtgacgaagagcaaaggttcacgggtatagcaattcttaagaagcagggaaaaaaatgttcaaacacttttttttattacatatatttttttattactacatgaaaaccggata

SEQ ID NO: 13178 - DNA, 356 bp, Glycine max
  Coding DNA Sequence Number=SeqID_3399
aaaattgcaatgaaggatgaccctttggggaaaagggggggaaaacttgcggtaaggcccgtttttgcccaaaaaattgcaacaacccgcaattcccctgaaaattgccaagggacttcccccccaaaaatcaaaaccgaaattgcaaaaaaaccgaaaatgtttttcatgaacccccccccataaatcccaaaaatggcaaaaaagggagttctaggcttcttagggggggcttctttgattgcgaaagttgcttccccaccatttggggcccagggagctagaataaatgacctgaaaaaggggtggaaccctgccctgaaacctatcttcttgaaacccaaaatctgaccccg

SEQ ID NO: 13179 - DNA, 404 bp, Glycine max
  Coding DNA Sequence Number=SeqID_3400
acctgtacaatgtgagtccctcttaccacagctgtttgttgtatcattgcaacataccaagagtgccctgattccatagaagaagatggctgtgtaagaatattgacgagaatggagatatttgtgtgggctttactgcctttacaatctatggtaaaaaactaaaaatgctatctagaaaatctgaaatatacacaattaaattaaatggaacaagtattaagaattacttgcctttgcttttctcagtagttatatttttaagataaagcttcaatgaagtgttgtttagccttctgttctgataatcaagcaatagatggctcagagtacattattttacaagttttcttttacttttatgagtttatttatatattgttttgcagatccagagcaacctg

SEQ ID NO: 13180 - DNA, 549 bp, Glycine max
  Coding DNA Sequence Number=SeqID_3401
ataacatacacgtactgcacgcgcgttaggtctaacaaatccagctgcgctaatagtcgtgtagttatcggtctggcgcttcatccggactctcgccgtacacgaccaaggcggtgccgggcgcgcgcgttccgtcagcgccagggacgtgtcacgtcgcgctcgagaatagcgggcggtgagaagaacaaaagaacgacacgcgaagaagcatctcagacaggagctcgagatgagacacgaaatgcgatacaaaacgagcgcccgggcacagaaatcggcatcaacctccgcatcctcgaatcaccacctctatacacaccgcgtccgccgcatttcccgcctggttgcacatgagatactacaaactgcgtacgagagcccacttaataggtaagtacaggaagtagaggaaatgcacgtggatcagtgaccggatgatatgagtgatggggggaggtggtttggtgagtgatatctagttatattgtatacgtaggtgagtccccgaccgccgcgcgggtgtagcgatgcactggtgcctcagaa

SEQ ID NO: 13181 - DNA, 564 bp, Glycine max
  Coding DNA Sequence Number=SeqID_3402
tctggattgcttgatccggtttacaagctggcttccggtgggtgtgataatactgtgaaagtgtggaagctctcaaatgggtcgtggaagatggattgctttccggctcttcagaagcatactgattgggttcgtgatgtggcttgggcaccgaacttgggtctccctaagtccaccatagccagtggctcacaggatgggaaagtgatcatatggacagtggggaaagaaggtgagcagtgggaaggtaaggttctgaaggactttatgaccccggtgtggcgggtatcgtggtcgttgacaggtaacatgttggctgtgtccgatgggaacaacaacatgacggtgtggaaagaggctgttgatggagagtgggaacaggtcaccgttatggaatgatacgtttcgctatttactttactgaattaaagtctttttaaaaggatcctttttctcaggctggtttggtggtctatctgtgagggaatgtggatgtgtttttttcttcttcttaatttgggtttcggaacattttggtcattttcatctttcctagcgactttt

SEQ ID NO: 13182 - DNA, 440 bp, Glycine max
  Coding DNA Sequence Number=SeqID_3403
gccatcgtagaaccctaacgtactttttccaacccgcttcgaagcgcttgaagcccactctccccgcatcatgcaaatccgacgacgccgatgcttccacgctctcctacgatcataagttgctgatgggatacaacaagctcctcgtcacctcccacaggtatctcaaactctgcgtcgagaggagctccaaaagcaagaatcaggtttaggtggcgtgaagctggaaaaactgcttgtgcaaaaaacggggttggaaacctccaccgggggaactcaaaaacccaatggcccccctcccccccaaattccgtaaaaaggaaaaattccgggggaaagagggagtttttccccccccaacgccttggtttttcaaggctttaaccccacgcctttttaaaaaagcaaaaggtttttctctatgggcaaccccctttaag

SEQ ID NO: 13183 - DNA, 526 bp, Glycine max
  Coding DNA Sequence Number=SeqID_3404
ttttttgccacgagctgccgggaggttgaagggggggagggggggaaccgcgggacaatagaaccagacgtggtatctcttctgtgtcagcgatttttgcgatggctggcctctactgttcatttgcgcaagacagatagaggtagtgtgccgacgcggcaagcattcgcccgcctccgggggtttcgtttgggggcagggttacaggagggttttaggagatagggttctgtccattggagcaacgtgggcgccaatttccccataatatcccttggcaatgacatactttttgacagcttaaatcggaggacaagcagtaatgaccttgacaatgaagctcttgcctttaaacctgttttaggctccatgcttgcaagaatttatcataatccacaaagcaatgaggaatacaggaaaagaatgcagcaaatggtggagttctggtcttctaagaaggtatacgatcaagagactatatctttctgaaaggtgagatgattggtgggccacaattgtttaaaca

SEQ ID NO: 13184 - DNA, 593 bp, Glycine max
  misc_feature (26)..(26): n is a, c, g, or t
  misc_feature (70)..(70): n is a, c, g, or t
  misc_feature (155)..(156): n is a, c, g, or t
  misc_feature (159)..(159): n is a, c, g, or t
  misc_feature (172)..(172): n is a, c, g, or t
  misc_feature (175)..(175): n is a, c, g, or t
  misc_feature (212)..(212): n is a, c, g, or t
  misc_feature (292)..(292): n is a, c, g, or t
  misc_feature (319)..(319): n is a, c, g, or t
  misc_feature (357)..(357): n is a, c, g, or t
  misc_feature (427)..(427): n is a, c, g, or t
  misc_feature (456)..(456): n is a, c, g, or t
  misc_feature (458)..(458): n is a, c, g, or t
  misc_feature (492)..(492): n is a, c, g, or t
  misc_feature (556)..(556): n is a, c, g, or t
  misc_feature (566)..(566): n is a, c, g, or t
  Coding DNA Sequence Number=SeqID_3405
ggtgatctttaacgtctgtcgctatnctcgcaccgcactctgcctgacacgccgcccgtatgttctgccngtgagtacgctcgctgccatctaggcatagttgagtcacgctgtgatatatatagagtgcgcgtcgcgcgcgctggctgcgttanntgngtctctgcgtgtnatntatgtctcgttcctcgtacacgacctcagccggcgantgccgtcgctctgatactggctgtatgtccgtgtgtgatgcaactcgattagtatctatacgcgcgcgtcgcacgactgntccagtgtgtcttatgtctagcggatnttcagatacgcacgtagttatgatacgtggtgcgcgcngcactgcatgtcgcgagcggcggccgtggtatgatagttattgtctagcgccgcacggcgtgcgcgccancgatagatactactattaccgattctctngngtacgtgctgcgctactcctgccacgcgccgctncacgagaaataatatacactatcgtagcggtacgctctgcgcgcgtcggtggtctttctgacgnctgataatangagatgttagctagtggaccgtcgcgc

SEQ ID NO: 13185 - DNA, 534 bp, Glycine max
  Coding DNA Sequence Number=SeqID_3406
gttagttattctcaatcctattcattgatgcattgatagatagtacgccgttcatcacgaacgacccaaacaagagagggagagcaatgatagtcacgagtgatagagggacggagctggcgcatagtattttgagctgccgacacaggtccgtctcacccggctgcctctctgaccccatgatgtggagctggagtgtgatgaagggtaagggataagggaatagacggtgtgcgggcataaaggataatatgtactgagacaagacgactcggagcactgctcgcatagagagatagaaacagatatgacctaaatataatactctccttctctgcccacggtgtccttaatatcgtataagtataaaaacagcacatggtaagaccgtagctacaaatacatttacccctatgtaacgaatacatctgaatccactacgatcacttcttgttggggcgtatcgctgcattcttctcgctagatatatagtatatctgtctcgaatctacgccgcgtgttgcatacgagtat

SEQ ID NO: 13186 - DNA, 361 bp, Glycine max
  misc_feature (178)..(179): n is a, c, g, or t
  Coding DNA Sequence Number=SeqID_3407
tagatcgcgcccgagccgttgttgccgcaccatcatcgtcctcgcggccattggcctccccggcgcccgggaggatgtccaggagcttcagcacggacgactccttcgtctacttgcttcgattcgagtaggggcgccccggaagctcgccatcgcccgtcttctccgccaccacggnngccgcatctcgtcgacgagcgcgaagcgtccggccacctccgcgccttcggccatgtccacgaaccccactaccccgtgacgatgatgatgcccctgtgatcgactacgtcaccgacgacccctccttctcgtctgagcaaccagatgctggagtccaggagctagagatcccgaggatgat

SEQ ID NO: 13187 - DNA, 461 bp, Glycine max
  misc_feature (77)..(77): n is a, c, g, or t
  misc_feature (158)..(158): n is a, c, g, or t
  misc_feature (252)..(252): n is a, c, g, or t
  misc_feature (356)..(356): n is a, c, g, or t
  misc_feature (358)..(358): n is a, c, g, or t
  misc_feature (360)..(360): n is a, c, g, or t
  misc_feature (362)..(362): n is a, c, g, or t
  misc_feature (401)..(401): n is a, c, g, or t
  misc_feature (419)..(419): n is a, c, g, or t
  Coding DNA Sequence Number=SeqID_3408
gtcctgtctatgttctcgattgctaagtatctcttgctcacaatgattctgacgattactctgtcgtcgatgtgcgnatgtgaagtgtgcggtactgtggtgccgtagtatcttgtcattttctcatatgctatctatttagtctcttctcgagtgtntgtgtgtgttatgttatgtcatttctattttatgtttgtcggttgaggcgcgtgggtttgctattcatatgtgtgattacgtattacagtatancacgctgagcgtgttgtgatatcgatcggactattatcaggtcgactacactacttctaccgatatgtcgctcgaacgtcgtcattgcactcacggccgcgggngngngngaaactatctcgtaatcatcttcttatcatatatgttgntcttgtctttgtgtgtgngtcgtatggatatgtgtgctatgtcgcataactcttcttatc

SEQ ID NO: 13188 - DNA, 568 bp, Glycine max
  misc_feature (36)..(36): n is a, c, g, or t
  misc_feature (52)..(52): n is a, c, g, or t
  misc_feature (76)..(76): n is a, c, g, or t
  misc_feature (88)..(88): n is a, c, g, or t
  misc_feature (101)..(101): n is a, c, g, or t
  misc_feature (105)..(105): n is a, c, g, or t
  misc_feature (124)..(124): n is a, c, g, or t
  misc_feature (133)..(133): n is a, c, g, or t
  misc_feature (140)..(140): n is a, c, g, or t
  misc_feature (146)..(146): n is a, c, g, or t
  misc_feature (148)..(148): n is a, c, g, or t
  misc_feature (152)..(153): n is a, c, g, or t
  misc_feature (205)..(205): n is a, c, g, or t
  misc_feature (222)..(222): n is a, c, g, or t
  misc_feature (250)..(250): n is a, c, g, or t
  misc_feature (319)..(319): n is a, c, g, or t
  misc_feature (322)..(322): n is a, c, g, or t
  misc_feature (333)..(334): n is a, c, g, or t
  misc_feature (339)..(339): n is a, c, g, or t
  misc_feature (413)..(413): n is a, c, g, or t
  misc_feature (458)..(459): n is a, c, g, or t
  misc_feature (482)..(482): n is a, c, g, or t
  misc_feature (543)..(543): n is a, c, g, or t
  Coding DNA Sequence Number=SeqID_3409
gatagagatgctcattatgtctgaaatacgtataanatagatcccgcatacnacatcatcgtctatgattatctancgttgcgaccanacgagatcgtacnaggnatgcatagtactcgacccnctgtcgctncgtctcntctatntncganngactgtgcaaatcgtgtgtacctatgcagtacgctgctctactgcagcagangatcgtgactacaacancgcagccatcacgccctgtctagacggncgtaatccgacagtcacacgtataccaaccaccatcctcgctgaccctcgacattcgtcaagcgcgcanacnttcatatatcnncttgngactagcacgtcgggcgtcacgatacgtgtctgtgtccagtgtcgaatctgatctagctcagtctactgcacantgtgagagatagtctctgcgtatcatcaacgatctcacgtatcanngcttctcacataaaagcgtcacncacgtcggcgcatatgtgagaaaaaatgagtcatcacgcactctacgcacgcaactcgacngcatacacatccttctaacatctgt

SEQ ID NO: 13189 - DNA, 503 bp, Glycine max
  misc_feature (79)..(79): n is a, c, g, or t
  misc_feature (322)..(322): n is a, c, g, or t
  misc_feature (366)..(366): n is a, c, g, or t
  Coding DNA Sequence Number=SeqID_3410
tatgaggcgcatgtgtctgttgtcatcttgtgttgttttgcatatataataaacaccaccgcacttctcctctgtaggngtgatgtcgacactatcttagtatattttgtgttttccgcttgtgcgtctctattgtagggtaatgtggcacttctcgcatattctaccaaccctccttcctcacatcctcttgcgtaccatatgcttctacttctactatgtatctcctctcatttttgctcttagatcaatacaatctctctctgcacacttgttctattaccagatcttcatcacatcatcaacaaagacaataaggagnagaacaatcgtctacgtctacgtgcatatgtggttaatacatanatagagcaggcatgctatataatatacgcacgtatatactagtatgaccatgatagatagtagtatgaagctttgtacgctatctcaaccaataccatctcgctcatgtacgctctctcctctcagaatacgattct

SEQ ID NO: 13190 - DNA, 529 bp, Glycine max
  misc_feature (196)..(196): n is a, c, g, or t
  misc_feature (403)..(403): n is a, c, g, or t
  misc_feature (468)..(468): n is a, c, g, or t
  Coding DNA Sequence Number=SeqID_3411
atctctgacgatcgttattcgcgggggcatattcgagcacgttatcactcccacacaacctgcgccggtttgcttgagtgatcaacactccttattaccgaataggtattcgttttcacttctctccccatatatttatcgttattgtctgtttagacgcctctcgttcctgtatgataactccctacactgccgntcgtctgctaataacaaagatacaacactatatcatttgtccacatcaactctctgccatttacgcccccgcgcgctctatctatttcgcgctgcgttcacaaccacatcattcgtctttattgtgtgcccgtccgcgcgtccgcgctctatgtgactgttggtgtcggcgctcgccgactttctcataacgaatatttacttagtngtatatcatactcatcttcaatcacgccaacgctactataatccgatagttgtgattacattacncgtatacttgagacgcgctccaccgctcacgtgctgagtggacgctgctttatacgactgt

SEQ ID NO: 13191 - DNA, 584 bp, Glycine max
  misc_feature (43)..(43): n is a, c, g, or t
  misc_feature (49)..(49): n is a, c, g, or t
  misc_feature (67)..(67): n is a, c, g, or t
  misc_feature (233)..(233): n is a, c, g, or t
  misc_feature (272)..(272): n is a, c, g, or t
  misc_feature (278)..(279): n is a, c, g, or t
  misc_feature (293)..(293): n is a, c, g, or t
  misc_feature (295)..(295): n is a, c, g, or t
  misc_feature (321)..(321): n is a, c, g, or t
  misc_feature (365)..(365): n is a, c, g, or t
  misc_feature (367)..(367): n is a, c, g, or t
  misc_feature (372)..(372): n is a, c, g, or t
  misc_feature (378)..(378): n is a, c, g, or t
  misc_feature (390)..(390): n is a, c, g, or t
  misc_feature (463)..(463): n is a, c, g, or t
  misc_feature (467)..(467): n is a, c, g, or t
  misc_feature (490)..(490): n is a, c, g, or t
  misc_feature (557)..(557): n is a, c, g, or t
  Coding DNA Sequence Number=SeqID_3412
gaccgacgcattgtcatatgtacgactgacaacacgtatgtcnatgttntacgtattcagaagagtnctgacgtcatgtacatcacgagcatcgatcgtatatacttcacactacgtagttacgcgcgatccactcgcgtatcgtacatcgacgactcgagatactgattgtctgatatgtctgtatatcgtcgctcacccatctacgcgtcacgcgcagcgcgacgcgacangctaatcaaggatcatagatatatagatgtcagcacgcncgacgnncgcgtctattaatnanatgcattacgatataactgagcgacnctacagctaacgatgtatggtctcgcatcacgacgatgactcantncgtantatgtngtataagttttnatattcatagtgtagtgcacgagcaagctcactcgtgtgatgatgctagtatgcatatctatggtactctgantacnaaatactagcagaacctgcattncattgaaacgtcatcatatggatactacacgtctaatgtgctggccgagccacgacgctgacctctnctgctcgagttcgcctcaatagtatta

SEQ ID NO: 13192 - DNA, 304 bp, Glycine max
  Coding DNA Sequence Number=SeqID_3413
tgtgccaattgttaaacccgccattaaggggtttcaggtctctagatcccggaagggataaagtgcatatttggaacaatggattgacgttgctatgcatcacggcttttacacatcaatgcagcgtacacagcgacagaggtcgttgaacagtagttggacaacttcctggcgtcacgtcgggaattctttcccagcagcatgttggctaagtacataagggccaggaggtgagattcctagagcagtcgttactcacatttttctgtcatcaactcagtagatcacgctaacaggtatatgt

SEQ ID NO: 13193 - DNA, 519 bp, Glycine max
  misc_feature (33)..(33): n is a, c, g, or t
  misc_feature (50)..(50): n is a, c, g, or t
  misc_feature (110)..(110): n is a, c, g, or t
  misc_feature (285)..(285): n is a, c, g, or t
  misc_feature (468)..(468): n is a, c, g, or t
  Coding DNA Sequence Number=SeqID_3414
gtcgcggcgctcatgtaattactagagggcgtngctcgatgcatgtacgnatcttgacacaggtagacagtattcgaacggtaaagagagagaaggagtgatgacaggancagaagccgacgtgtcagacgatagtgtatatgtgtgtgtggtgtcgtcatgtggtgccatctcggctcgctccacacgcgagagggaacggcagacgtatgcgtcagcgcattcgcgagtctctgtgataatgcacacggcgatgcacacagctaagagcgaccatgcactccnatcgccgcagacgctatccgcgccccgtctccttcgcgatacgctatctctcttgctgtccgcgtggcgtacggatagcagcaacgacaccggctgaaggctcgtacgatcatcacatctcgacgtcgcccgatgccacgtctatcgtaataaatcttacgtcttcgttgcctatgatcatgnttaatcgatataggtaggggtaatgatagcaaaaggcgcatggttacaaag

SEQ ID NO: 13194 - DNA, 224 bp, Glycine max
  Coding DNA Sequence Number=SeqID_3415
taagagcaaaaagggcagggtacaaaccaaaaaaaccacacataaccggccacatggcccaagcccaaacgagaaggcgaacagcaagacactaaccaagagccgagcccccaaaaaccacctaaacggcgcagcaccgacggagaaatccaagccaccccacaccacgacaaacaaaggggccaaaaaccgaacaaacggagaacagccacccgaaacaaccg

SEQ ID NO: 13195 - DNA, 567 bp, Glycine max
  misc_feature (63)..(63): n is a, c, g, or t
  misc_feature (133)..(133): n is a, c, g, or t
  misc_feature (148)..(148): n is a, c, g, or t
  misc_feature (150)..(150): n is a, c, g, or t
  misc_feature (187)..(187): n is a, c, g, or t
  misc_feature (198)..(198): n is a, c, g, or t
  misc_feature (203)..(203): n is a, c, g, or t
  misc_feature (213)..(213): n is a, c, g, or t
  misc_feature (218)..(218): n is a, c, g, or t
  misc_feature (245)..(245): n is a, c, g, or t
  misc_feature (325)..(325): n is a, c, g, or t
  misc_feature (329)..(329): n is a, c, g, or t
  misc_feature (374)..(374): n is a, c, g, or t
  misc_feature (402)..(402): n is a, c, g, or t
  misc_feature (435)..(436): n is a, c, g, or t
  misc_feature (490)..(490): n is a, c, g, or t
  misc_feature (502)..(503): n is a, c, g, or t
  misc_feature (536)..(536): n is a, c, g, or t
  Coding DNA Sequence Number=SeqID_3416
tagtctgtcgatacttaccttcacactcactactcactcgcgtaagcatagcgtcctctatanagtagacgacgttacacacgacgcgcatatgagctcgcccatacctacacatgatcatgctgtcgtctantcacagcgaatcacnantatccacccacacgacgactgaccatctactgcatantgactagatanagagncatgatgtgncgaantagagagagcagtacgcacttcattcnctctacgtcacgcatcaggcgacacacatacgtgacgctcatagctccatctcacctcgtcgtatcacacagcgtacagnactnactatatatatacgctcgtgatgtcgactatccgtactcgtcgtnactaatcgacacgacgcgtcatgagtanctcgactggagagtacgatatgaagatcgagcnntgtcacgagacttataacgtgctgcagtcaacagactacgcgcgacgcgagtgnactatgtcatannatgtataacttacgactgaacatctactactanctttacgactacttgacgacacatcattgca

SEQ ID NO: 13196 - DNA, 473 bp, Glycine max
  misc_feature (26)..(26): n is a, c, g, or t
  misc_feature (35)..(36): n is a, c, g, or t
  misc_feature (46)..(46): n is a, c, g, or t
  misc_feature (63)..(63): n is a, c, g, or t
  misc_feature (87)..(87): n is a, c, g, or t
  misc_feature (93)..(93): n is a, c, g, or t
  misc_feature (108)..(108): n is a, c, g, or t
  misc_feature (145)..(145): n is a, c, g, or t
  misc_feature (153)..(153): n is a, c, g, or t
  misc_feature (161)..(161): n is a, c, g, or t
  misc_feature (166)..(166): n is a, c, g, or t
  misc_feature (171)..(171): n is a, c, g, or t
  misc_feature (193)..(193): n is a, c, g, or t
  misc_feature (208)..(208): n is a, c, g, or t
  misc_feature (221)..(221): n is a, c, g, or t
  misc_feature (227)..(227): n is a, c, g, or t
  misc_feature (238)..(238): n is a, c, g, or t
  misc_feature (240)..(241): n is a, c, g, or t
  misc_feature (243)..(243): n is a, c, g, or t
  misc_feature (252)..(252): n is a, c, g, or t
  misc_feature (260)..(260): n is a, c, g, or t
  misc_feature (272)..(273): n is a, c, g, or t
  misc_feature (277)..(279): n is a, c, g, or t
  misc_feature (283)..(283): n is a, c, g, or t
  misc_feature (285)..(285): n is a, c, g, or t
  misc_feature (305)..(305): n is a, c, g, or t
  misc_feature (314)..(314): n is a, c, g, or t
  misc_feature (321)..(322): n is a, c, g, or t
  misc_feature (355)..(355): n is a, c, g, or t
  misc_feature (401)..(401): n is a, c, g, or t
  misc_feature (439)..(439): n is a, c, g, or t
  misc_feature (444)..(444): n is a, c, g, or t
  Coding DNA Sequence Number=SeqID_3417
gagtatagagtcacaatagcgacctntctctatcnnagtgtgcgtnattccgataagagacanagcagcatattagtatatgatatngaatangaactacactatgtnagacagatgatggtaacgcgacgcagacacatagtangatatatngacatganatagnacgangatatgtgttcattctctgtcntcttgaatcatctanatgtgactgtgtngttagngctacgatggntnngnccgcgttcngaaatcantgtcaggacagnnagannngcanantcctctctcgcacgtacgtnctgtatatngcacgcnntagtaacgccgtctcggtgttccccatcctgcnacatacggcgtcatatcgaagcacagtcaacaccggatgcgccacnccgccgtagctgtagtggtacattgactctagtagatnattgncacagacaacagctataatagacactcat

SEQ ID NO: 13197 - DNA, 542 bp, Glycine max
  Coding DNA Sequence Number=SeqID_3418
attttttatctaatcgaccctcatcgccccatttcttatgttcttctttttctcgtgccgcttctcttctattctatctatctttccaccccaatattgtctagacccactctcccaatcattctaccttcatacccatctcactctattcctaccacacacccacctatccctcactctcctctccacttcttgtctccacgctcttacgcgaacccaagctacatgagatgatgtcacatacggccgcgataactttataatagccgtcgatcatgatcactcatctatactatattacgtaagtagcgctgagaacatactattgctgcttccaactttgtaattctacctattcttcttctctttcatcacgtaccgactaactatatatctcctcacaccacacaccatatctatctctccctattcacatgtacactctatctttatattatatccaccctctaacacacatctcatattcgcatctttctataatgatacaacacctacattctatcgatgtcttatacccacag

SEQ ID NO: 13198 - DNA, 523 bp, Glycine max
  Coding DNA Sequence Number=SeqID_3419
gtaatcatgtcaatagcagtcggaaagaggaacttcgctgagaacttcagcaagatgatgatcaatgacttccagagagacaatctctatcgttctaagatggttgtcaacgaaaataccctaactaacagaacttataccaatcaacctaatgctgcttattattctgaaaatgttataattttagctcagcaatttccccaagtcgaccagagagaattgttgactgttcttgacgactgtgacaatgatctagaaattgccgtggaaatcctccaaaaaggcattcagaataaaataaactcccctaagctagttccaatggaaggaagaactattaaaaaaataaatggtgctaaggaagctgaacaaaagagcaatgttttggcccttagacaagccgaagaaaagaagtctgataatagtattcaagaagaagaccctgctgctagtgctaagtgggctgagactagaaatttatccgctaatgtaattgacaagttgcagactttgaataccatgg

SEQ ID NO: 13199 - DNA, 524 bp, Glycine max
  misc_feature (450)..(450): n is a, c, g, or t
  Coding DNA Sequence Number=SeqID_3420
gatcgtcgtgtgacaacgcctgcgagtataacaccgcggcatgacatatatagtaggatataacggactgtgcgtgaactgcgtctagggcgagcggcgtaataatgaagattaatcgtcgccacaacacaatatatcgctgtgtttacgttacttcgccatatacaccgcgcttattattttttacccttcttcctccttgcgggcgcgtttctttcgttcgcactcttcatattctaataataatatctccacattacgtccgccgcgccaacccccgcatattatttggcccggcggcgcgcgccgtcttgtaaacgcacttcataactgagaaagggctgccgcgaaagtcgttaaacccgcgcgaattaatgacgcgcggccttattatattactatatcagctgtagccgtgtggaatcacaataatatcgcgagaaccgacanggagaattaatttatcactctattttcgccgtccgcttctctctattaccgcggaatattatcgccagacgtat

SEQ ID NO: 13200 - DNA, 411 bp, Glycine max
  misc_feature (32)..(32): n is a, c, g, or t
  misc_feature (35)..(35): n is a, c, g, or t
  misc_feature (178)..(178): n is a, c, g, or t
  misc_feature (189)..(189): n is a, c, g, or t
  misc_feature (194)..(194): n is a, c, g, or t
  misc_feature (196)..(196): n is a, c, g, or t
  misc_feature (217)..(217): n is a, c, g, or t
  misc_feature (248)..(248): n is a, c, g, or t
  misc_feature (286)..(286): n is a, c, g, or t
  misc_feature (316)..(316): n is a, c, g, or t
  misc_feature (318)..(318): n is a, c, g, or t
  misc_feature (339)..(339): n is a, c, g, or t
  misc_feature (355)..(355): n is a, c, g, or t
  Coding DNA Sequence Number=SeqID_3421
gatcaaaaccttaatcgtcccctcatgctctncgncttccccaaaatccaatctcagctcagcgaagcccttgccctaatcggtcaccacgatttcccaaatctggccctctttcttcccgaactcatcgcaaatcttcaaaaagccttccagtccttcgattacgccttcattaacnggattctcggnactgntnactctattttcaagaaattanggttcaagtattaaacccatggacctattgntcgacttaaagtactggcttgacactttggccggttcnttattggagaatttcctcaagaaggggttngntgatcgaagccggggccggcnaacttgggcccggttntttgaggtccaaaaaggcttgggcttgcagggaaaattcttacttcgcctggaaat

SEQ ID NO: 13201 - DNA, 559 bp, Glycine max
  misc_feature (392)..(392): n is a, c, g, or t
  misc_feature (438)..(438): n is a, c, g, or t
  misc_feature (466)..(466): n is a, c, g, or t
  misc_feature (469)..(469): n is a, c, g, or t
  misc_feature (507)..(507): n is a, c, g, or t
  misc_feature (525)..(525): n is a, c, g, or t
  Coding DNA Sequence Number=SeqID_3422
actactctcagcacacatatatcacctcttacgtcgcaacgtggcacacacctctgcgatcttcacttcatcgccttcatcctactgtccctctcatgccgacctcgcactcctcgcactactaacaaaccaatactcatatattgtgtctctcctcacaaattgtcttgtggcgtatactatagatatgatacaggaatgggcaagaggggagaatgtacagatcagctgctacgttgtctgctcatctctcgttactctatctggcgtatagctaatatactacatacaaaatatccagctaccatattcgctacacaatgtagactgagagacccaggcggatatatattacacaacatgagagtgatgtgagctgcatctacgcatangcggagatgattagtcggtagcataatgctatcatactcactactnctgacgcaagatcatatatccaactcgntancgagcgtctaatactatatcataaatatacaatatatnctctgcgagtcagacganatttgtcagtactcaccgactatcctgatggaga

SEQ ID NO: 13202 - DNA, 473 bp, Glycine max
  Coding DNA Sequence Number=SeqID_3423
agccacattttgtttcctcgtctcctctcactcgttcaaccggcgccgctcgtcttcaaggaaaggtttgagagaaaatgagtcgcggagctgcagccgttgccaagggaaagaagaagggagtgtccttctccattgactgctcgaagcctgtcgatgacaagatcatggagattgcttccctcgagaagttccttcaggagaggatcaaagtcggtggcaaagccggtgcccttggtgattccgtcacaatcacacgtgagaagaacaagatcactgttacctccgaaggccaattctccaagaggtatttgaagtacttgacgaagaagtacttgaagaagcacaatgtgagggattggcttagagtgattgcggctaacaaggaccgtaacctctatgagttgaggtacttcaacatcgctgagaacgagggcgaggaggaagactagaagagcgctctactcttgttt

SEQ ID NO: 13203 - DNA, 435 bp, Glycine max
  misc_feature (39)..(39): n is a, c, g, or t
  misc_feature (41)..(41): n is a, c, g, or t
  misc_feature (152)..(152): n is a, c, g, or t
  misc_feature (224)..(224): n is a, c, g, or t
  misc_feature (226)..(226): n is a, c, g, or t
  misc_feature (340)..(341): n is a, c, g, or t
  misc_feature (347)..(347): n is a, c, g, or t
  misc_feature (389)..(389): n is a, c, g, or t
  Coding DNA Sequence Number=SeqID_3424
aacaaacgggagttctctcactgcgatattattgttatntntatagttactactattcatatgttctttactatatgatccgcacatcacacagctactaccacggttgctcttgtcgcctgtatcagtgcgggggtcgtgcacacagatgngggagcgcgttagcactaacaggttaaaggagtgctctaatataaatgtatgataaagtatgaggtgtgtgntntgatggcgattgtacaaggacggtgaagaagaagaggagaagatcacactctagtgattgtatagatatgagttttgattctgggcggatgctgaccggcgatggccactaatnnactatnttgttgggttaaggcctgtggaaagatatgtcggctgttctngtcactaccataactaatgtatgcacttcgtttgctctggagaaag

SEQ ID NO: 13204 - DNA, 555 bp, Glycine max
  misc_feature (156)..(156): n is a, c, g, or t
  misc_feature (438)..(438): n is a, c, g, or t
  misc_feature (441)..(441): n is a, c, g, or t
  misc_feature (453)..(454): n is a, c, g, or t
  Coding DNA Sequence Number=SeqID_3425
ttggaggacgaccatcgtgattgttgtctcacccccgccacgctctttaaattcactaaatatcagtttactctacccctccgtcatgccacttcgcacgccgccccctcgcgcccccgcaccgcagctccacccgcccacatcgagctctagcgnagggaggacgcctcaagtattgtggctcccgacatactcgtgccgcgcctacgacgcaaactaaaacgtctaagaaagaccagacagaaggatcttagcgcactcgcatgttcttcacaatcaaccagatttaaactaccaccaaacactatactccagcccacccaattattcagtccacacacacacacactccaacaaagcatatacggcgtctaccgctgtgtagtccacctactctccttccgcattcacactgggaaggcagagccattactaaanaanaacagatcaaannatagtgatggggtgaggcgtcctcgattgtatgagcgggtgtatttgtaatatttgagtgatatatatgatttagtgatgtcggtgttgttagttgttgta

SEQ ID NO: 13205 - DNA, 551 bp, Glycine max
  misc_feature (219)..(219): n is a, c, g, or t
  misc_feature (243)..(243): n is a, c, g, or t
  misc_feature (423)..(423): n is a, c, g, or t
  misc_feature (505)..(505): n is a, c, g, or t
  misc_feature (525)..(525): n is a, c, g, or t
  Coding DNA Sequence Number=SeqID_3426
tgttttgacgaggttgtggtggcacgcagacggtattaaaatctctccccacccacccctcccctccgcctctaaactataatctatcttttccctcccccacccgaaacaatactctaacttacacagcccccccccgttgagcggggtatggggcccggccgcacaccgatacccgcgcgcttcgcgggccgggcgcggccgcgcgggcgcgacccntgccgccttccctcagagctcgtnaaaactcaactaccccgggagagaaggtaatagtgtgtggagaagatattagatttatcagaataatttgagagaattattgataatataatcaatataataaatcaatatgcaaatcagaacagtaatattccactactcatataacagaaaaatggtggagaggtaccggctcagagnaaaacaagaattatatctatatattcatataatagaagagcgaacgcaaactattgcagaaggagggatatagagcatattnaaaaaaatatattaaccatnataagcatgatgcgttgcgcgtggta

SEQ ID NO: 13206 - DNA, 560 bp, Glycine max
  Coding DNA Sequence Number=SeqID_3427
tatcgtttacagtgcgtgaaccgtatgatgggcgtgaagttcgaagcatgcacgggcatcagccaatcaagacttgagttgctatcgctgttattccaagccgatgaaatcagccaatcagatttgcagaaaaaagtaaatattgatggtgcagctgtgacgcgtcacttaaaacagctagaaacaaaaggaatggtcacacgcagaagaaaaccagaagataatcgagtcacacttgtccgcttaacagacgaaggcagaacaagaatcgaagcttctaaaatagaaaaagaacgatttatctcagaaatgcttgaaaacgtaagtgaagaagaacgaaggcttctcactgatgtgctcatccgtatccaacaaaacatcgaaaagattcaaacaacctaaaggagtgttacacatggctacaacattaaaaacaaacgattttatggaaattatgaaagggcgccgctctattcgtaattatgatccatctgtgaaaatcagcaaagaagaaatgacagagattctagaagaagcagcaactgcaccatcatcagtaa

SEQ ID NO: 13207 - DNA, 481 bp, Glycine max
  misc_feature (42)..(42): n is a, c, g, or t
  misc_feature (44)..(44): n is a, c, g, or t
  misc_feature (62)..(62): n is a, c, g, or t
  misc_feature (145)..(145): n is a, c, g, or t
  misc_feature (181)..(181): n is a, c, g, or t
  misc_feature (205)..(205): n is a, c, g, or t
  misc_feature (207)..(207): n is a, c, g, or t
  misc_feature (222)..(222): n is a, c, g, or t
  misc_feature (287)..(287): n is a, c, g, or t
  misc_feature (305)..(305): n is a, c, g, or t
  misc_feature (338)..(338): n is a, c, g, or t
  misc_feature (340)..(340): n is a, c, g, or t
  misc_feature (344)..(344): n is a, c, g, or t
  misc_feature (356)..(356): n is a, c, g, or t
  misc_feature (367)..(367): n is a, c, g, or t
  misc_feature (371)..(371): n is a, c, g, or t
  misc_feature (383)..(383): n is a, c, g, or t
  misc_feature (387)..(387): n is a, c, g, or t
  Coding DNA Sequence Number=SeqID_3428
gactcacatgagtcttgctggacatacctcgcatcgtgctancnagcatgacacgacgatcnatgtgatagtaatcgcgtcgtcagtacatatatctctacttatctccatgcgcctgttacgcagcgatagacgctgaccgcanactatgctagacagcgtcgcgactacgtcatctctngtcgtaacgcgcaatacatatcantncgaagctctctatanactcatctcgatgcatgtatactcgctctgatctcagtttcatgtagcgccccgactcatacatngagtccatgctcacatangtgctccgctgcagtctgcacacgacgacgctncngcangacgacgtaggngatcagatganacgncatcgccgacancaantactcacgtacatccgacgatcagcgagagtgatgtggtacgtgaactattgatgcgaccattatcatagaactactcactacgtacttcacat

SEQ ID NO: 13208 - DNA, 310 bp, Glycine max
  misc_feature (166)..(166): n is a, c, g, or t
  misc_feature (221)..(221): n is a, c, g, or t
  Coding DNA Sequence Number=SeqID_3429
catttatttacatcaactttgaccaaacaatgattatataagcaggcataatatgtacatcaattatgataagcgagatatttctaaaaaattaactaaaactaagtctttgtaactaaaccgttattcttgtttcaggttgaggtcactccttttcatgcgtggnggaacaggcgggggctggtcactatctggttcaggctcataatacgctttgtacncatacagtccaataattatgttgacagctagtacactagcaataactgaccatacaatatttgagaaatcactaacattaaaaacgtct

SEQ ID NO: 13209 - DNA, 511 bp, Glycine max
  misc_feature (38)..(38): n is a, c, g, or t
  misc_feature (71)..(71): n is a, c, g, or t
  misc_feature (195)..(195): n is a, c, g, or t
  misc_feature (485)..(485): n is a, c, g, or t
  Coding DNA Sequence Number=SeqID_3430
tcaggccgcggactgcatagactgcgcagctgcggctntcgtccacctatacagacgacaatgttatatgncatacgcgagacgagcgagatgcggctatgaggtagacgcagaacgagatagaccgcggcggccgatgagaggtcgagcccactgctgagctgccacctcgctcgtaacatggtgcgcacaacncgtattcgtgcatcagtcagcagcgccccgacgcctctcgcatcagtcgcactccgggacgcagacggacaatcgtatgtatcatcatatggttctccgtctctctctgttatgcgtgtgttagtgtgatgtatatgcggtgacattgtgaacggctgtgagtgcgccttgtattggtgaggatagatgtgtaggtcgaggtagacggtattgtctagtattgtgatatttgtgtgtctcgggtctactatcgcgcctctctcgcgctacatgaccagctctgtgtgctntgtgactcgactatgtcattcgatat

SEQ ID NO: 13210 - DNA, 549 bp, Glycine max
  misc_feature (131)..(131): n is a, c, g, or t
  misc_feature (235)..(235): n is a, c, g, or t
  misc_feature (290)..(290): n is a, c, g, or t
  misc_feature (488)..(488): n is a, c, g, or t
  Coding DNA Sequence Number=SeqID_3431
taagattgatctgatcgtgaccggggagtgtgtgcgcactgcgtagggagatgtcgctcagggggcgtctgaggatgtgtatagtgctggggggccagacgctggtcgcgcctgtggggatatattcatantatgacatatcatagctgtgattatgactgaggaagatatcatagatctgagtatcatagatgactagacagaacgcgacactcgagtgagtgagagagagcgnaatgcgcgccgtggatatagtggtgagacacgatatgggctccatcatcgtagangagtagaggtgcagttatatccacatatggatgagagtcaatttaatcactagcccgtagattgtcgaggtgttattaatctatatgaagtgctaaagtagagagcaatagacatccatcgtgtggcgcacgacgaactctgctcgcagcctgcatgaacgcgtcgtcgcgtagaaagttaatatggtatggcggtgnagtagcggcgtggagacctgggagtgatggggtgtgtataatggtagtgcgctgggtcgtt

SEQ ID NO: 13211 - DNA, 287 bp, Glycine max
  Coding DNA Sequence Number=SeqID_3432
gtctataacaagtactctattcaggcctatcctcagagattctgacataaatattggtttttgtaacttaatagtaagtaactcctcaacccaacaaaattctaaagcctccatcttcccttaatagtacccggtgggtcgaaatcattgcaactaaatcatcaaagttaaatgggtattcagcaaaacccaaaaagattaaaaatttaaaaagaaaaaactaaaatttataatggggtgtggaaaaaatggagcagctacgaaacggagcgctggcgccacaactg

SEQ ID NO: 13212 - DNA, 538 bp, Glycine max
  misc_feature (154)..(154): n is a, c, g, or t
  misc_feature (176)..(176): n is a, c, g, or t
  misc_feature (379)..(379): n is a, c, g, or t
  misc_feature (413)..(413): n is a, c, g, or t
  misc_feature (490)..(490): n is a, c, g, or t
  Coding DNA Sequence Number=SeqID_3433
aatttctctcgttgacttgcgttagaagtcacatccttccacatgctacagtctggtaattcgtatcccatgcgaagcagcaatgatcgtattgtctgctcgtgcgactgacgcttatctgtctgtgcgcagattgatactgaacgacgaccgnattctacgttcacacggtcatncttgtcatacaagatcgatcattcacaccgaaacgtcacgtagttgactcatattcgcgacaagtgtgacatgcgtccacacatacatcgagctagattcgagataatgctcttagtttctctgtctcgtaaacggatgacctatatgcacgttacgtgtgtataatctcagccacgtgagagctcacactaatagacacctngctgctgcttctatgcgcacgcgacttgcaaggncacgagcgatctactacatatctgatagagagctagatacatacataactatacgtatcgaacgcgacgtccaagantaacagtgcctcgcacgacgaccgacatctgacgtctgctcatataga

SEQ ID NO: 13213 - DNA, 505 bp, Glycine max
  misc_feature (75)..(75): n is a, c, g, or t
  misc_feature (128)..(128): n is a, c, g, or t
  misc_feature (200)..(200): n is a, c, g, or t
  misc_feature (261)..(261): n is a, c, g, or t
  misc_feature (263)..(263): n is a, c, g, or t
  misc_feature (340)..(340): n is a, c, g, or t
  Coding DNA Sequence Number=SeqID_3434
tcgtgcgagagatcactctctcgattctcctcttcgtatacgtgtcgcttccgcgcgcgctatctcctccacgtngctaccttcatacggcttgtgacgcgctatcccacttgtcatccggtctagtnactactacgcactcgaccctcgtcacatggcgcggcggtgccgccgttgggctgcggcgcgtggtgcggcgncgtggcgtcgcgcggccgggcgtactgtagggttatgcgggtatgtcgcgccccgttctgncnccttcgcctgctctctcacgcgcgtctctccctctcttactatacacgcctccctccacctatcaatctcgttcatntgcgtcccagctacgatgtaactccacaccatcaccaatctaagcaggagagtgacgaacgcggaaggactagttatgccagttattgcggagcgggtgtgtgtatgataaatatagtttacttatctacaagactgctagacgaattctcgtagtttttacatt

SEQ ID NO: 13214 - DNA, 261 bp, Glycine max
  Coding DNA Sequence Number=SeqID_3435
gcgtgacgacttgtctaaggtttgtggaattgggtgtggttgatgtgttgttgaaagttcttgttgatgcacagagaggcgtgtgtgacaaagctttggtggtgttggatagcctttgtgattgcaaacaaggggtgtagatggtaaatgctaatgctttgactgtttctcttgctattaagaagctctctacggcgtttgtgatgtgttcaagctacatcatattcagttgtttggaagctttgctacacaatatagcag

SEQ ID NO: 13215 - DNA, 549 bp, Glycine max
  misc_feature (333)..(333): n is a, c, g, or t
  misc_feature (440)..(440): n is a, c, g, or t
  misc_feature (492)..(492): n is a, c, g, or t
  Coding DNA Sequence Number=SeqID_3436
gccggatcgcgtgagtacgactgtataatatatatagtaatccgatcgcacagtcgcctcttgacacgtcgtgatgtatgtctcgtacaacagagctatatattagctacatcatccactagtctcgatcgctctctctatcacctcatcctctctactctcatgtgtctgtctcattgtatatcctcattctcttgtctggacatgcgcagcactcacgtctctctatcctctttatcatccacactcctctgctccactatcgctgctgtatactcgtgtgctatatgtgttggtagtactcgcgcttctcgtctctgctcctctctctcnctcgacattcatctgttctctctgtgatagtacgtggcgaccgctgttgcacacacgccgcctgccgcgtgcgacccactacaacgcactcacatccactatacaangctccacatacatctcaccactccctcactctacaacaaaaactcacgacantatcagttcatacgatatcgacactgtatgcgacggcggatgcatatgtacgtcatg

SEQ ID NO: 13216 - DNA, 133 bp, Glycine max
  misc_feature (26)..(26): n is a, c, g, or t
  misc_feature (98)..(98): n is a, c, g, or t
  Coding DNA Sequence Number=SeqID_3437
aattctccctttataaaattatgcantcatttatatattcagtttacgaacaatctgggttctcctactgtatatacttaaatatcttcttggggtantttggaaatcactttgacaagatcttcataaactt

SEQ ID NO: 13217 - DNA, 568 bp, Glycine max
  misc_feature (287)..(287): n is a, c, g, or t
  misc_feature (342)..(342): n is a, c, g, or t
  misc_feature (385)..(385): n is a, c, g, or t
  misc_feature (398)..(398): n is a, c, g, or t
  misc_feature (411)..(411): n is a, c, g, or t
  misc_feature (430)..(430): n is a, c, g, or t
  misc_feature (528)..(528): n is a, c, g, or t
  Coding DNA Sequence Number=SeqID_3438
gagggtaagcgtatctactatctatgaaacatgttgggtgtgtatccacggcgcaccacccgcctcaccgtatctcatcggtgtcgtaatgtgttgtgttaactgctatatcattactatataagtcaatctcccataccacatctcgcctctccctgttctattatatatatattaatatattcgtgctaagattgcatctcggtggtctcggaatattacaacgcgacacgcccactcacacaacaaccacacccgtatgatcgggagaactttgatacgctgtnttgatcttctaagaacactcgttcgcattacatatgctgtgatacggtaagtagnatactcgtcgcttaactgtctacatcggttcactgcgtcaatntcacgctcgactncgggctgtggtcntcgtatctatcttcatatngctgtgcttacagcgcttctaatatactgcgacatgctatcattcgtctctcaaatctgcgctcgtctctctgtcaacgaactactctggtaggcganacatagacacaataataacagtgcgacgacaacctcatct

SEQ ID NO: 13218 - DNA, 557 bp, Glycine max
  misc_feature (86)..(86): n is a, c, g, or t
  misc_feature (102)..(102): n is a, c, g, or t
  misc_feature (181)..(181): n is a, c, g, or t
  misc_feature (184)..(184): n is a, c, g, or t
  misc_feature (244)..(244): n is a, c, g, or t
  misc_feature (258)..(258): n is a, c, g, or t
  misc_feature (265)..(265): n is a, c, g, or t
  misc_feature (270)..(270): n is a, c, g, or t
  misc_feature (292)..(292): n is a, c, g, or t
  misc_feature (345)..(345): n is a, c, g, or t
  misc_feature (352)..(352): n is a, c, g, or t
  misc_feature (359)..(359): n is a, c, g, or t
  misc_feature (388)..(388): n is a, c, g, or t
  misc_feature (398)..(398): n is a, c, g, or t
  misc_feature (457)..(457): n is a, c, g, or t
  misc_feature (468)..(468): n is a, c, g, or t
  misc_feature (471)..(471): n is a, c, g, or t
  misc_feature (480)..(481): n is a, c, g, or t
  misc_feature (489)..(489): n is a, c, g, or t
  misc_feature (525)..(525): n is a, c, g, or t
  Coding DNA Sequence Number=SeqID_3439
atgacgatgtcgctgcactcgtgaccgactacgtagttgtatcgtctactcgacagcagcatcatacgcatcgctctctagatcancagccacatagtattnaaacttactataattagcacaaactgtctagatcagctccgacgactatactcatctttcatctacatggtcatgaatncangctacacactctacagctctactcacgtgcactcacgatcgtcagctcatatgtgacgtnatgatacgagacancatcgtngagtnagagtgtgtagtgacagatganacgaagtatgtatgctgcgtctcgctcactgctctgtagtctactacgactcncgacgcngccgtantcgctcgatctcgttactgctgtcgatanttatatacanctcgacatcacgacactgcatgatagtagcagtcataatctagtcgttagctgcagcgntgatgcaacgnatnacatctctnntggatgtnacgtcgtgctgtcttacgagaggactgagtgtgctngtctactagtcgtcacacgatgatgttagcgt

SEQ ID NO: 13219 - DNA, 245 bp, Glycine max
  misc_feature (85)..(85): n is a, c, g, or t
  misc_feature (120)..(120): n is a, c, g, or t
  misc_feature (131)..(131): n is a, c, g, or t
  misc_feature (220)..(220): n is a, c, g, or t
  Coding DNA Sequence Number=SeqID_3440
gtaactgtattatatatggctctctacgtgcgtcaagacctcacactcacagtcgcggacgcgtaccacccacacacctccatcntctcgtgcgctgctcactctgacattacagagacntatatgagtcncatatgaggagtgacggaagtggatgtgggtttgagttcggctcgtcttgttggtcgtctacgctgacgtcttcgccgtcgtctctctnttatgtactcttctcttccgcgctc

SEQ ID NO: 13220 - DNA, 285 bp, Glycine max
  Coding DNA Sequence Number=SeqID_3441
gggaagccgctggatccattgccgcaaggacatgccagcgtgtggcataagagtgaggtttcaagtggttgcgggcattcgtcttgggtcaattttattacgaatagtgcttgtgtgggggcaattttttggtggccctttttcaactttcccagagtagttggcataaatgagtatcagtcttgggaaagttcgagcccatatgttttgtgtttccgtgttctgcaatccaatactgtttggctgttctaagtttataaggatttcttctatttggtcggcttg

SEQ ID NO: 13221 - DNA, 535 bp, Glycine max
  misc_feature (48)..(48): n is a, c, g, or t
  misc_feature (52)..(52): n is a, c, g, or t
  misc_feature (59)..(59): n is a, c, g, or t
  misc_feature (98)..(98): n is a, c, g, or t
  misc_feature (110)..(110): n is a, c, g, or t
  misc_feature (187)..(187): n is a, c, g, or t
  misc_feature (204)..(204): n is a, c, g, or t
  misc_feature (230)..(230): n is a, c, g, or t
  misc_feature (239)..(240): n is a, c, g, or t
  misc_feature (268)..(268): n is a, c, g, or t
  misc_feature (277)..(277): n is a, c, g, or t
  misc_feature (282)..(282): n is a, c, g, or t
  misc_feature (296)..(296): n is a, c, g, or t
  misc_feature (299)..(299): n is a, c, g, or t
  misc_feature (302)..(302): n is a, c, g, or t
  misc_feature (349)..(350): n is a, c, g, or t
  misc_feature (354)..(354): n is a, c, g, or t
  misc_feature (372)..(372): n is a, c, g, or t
  misc_feature (421)..(422): n is a, c, g, or t
  misc_feature (460)..(460): n is a, c, g, or t
  misc_feature (481)..(481): n is a, c, g, or t
  Coding DNA Sequence Number=SeqID_3442
cgcgtacactagaactcgcatgccgccgcgcgtcacgcccactcaacnacgncaccagncagcgcggctccggcgatctgacgcacctacgctaccgngagcggaggtgnatgtgggtggccctgcgtggacggctggccgtcaccctctatgcgcttctacgcgcctcctcctgcacactgtacgncgtgtgcgcacatcatntagtgggcggcgtcatcatgtatgtntcgatctcnnctccgcgcactgccatactgcacgcagnctgagtggntctanataccatctctganctnggnggtgcatgtactacctacagcaagaccgcgtgcatctcacgccgacnngcgncgagcacacaagcacttnacgacatcgtctcgcacgtgtgaggatagaacaagactactatcatcanncagggagagacaacaagtatcagcaagcgagtgtgtgnatgctttagtaacgtctacanagtgtggggccgcgctcctgcgtactgaagcacgttaaacatcaactcgcgact

SEQ ID NO: 13222 - DNA, 397 bp, Glycine max
  misc_feature (66)..(66): n is a, c, g, or t
  misc_feature (73)..(73): n is a, c, g, or t
  misc_feature (157)..(157): n is a, c, g, or t
  misc_feature (172)..(172): n is a, c, g, or t
  misc_feature (207)..(208): n is a, c, g, or t
  Coding DNA Sequence Number=SeqID_3443
aggaagaggccccaggcaaccacaaggaccccggcggagccccagccaacgacgccaacgccgggncgcgacncggcggcaaagccgccaacgaaggcaaacgcggggacgacgaggcaggccacaggcgagccggaaaccgcaaggagaacggggnccgcgccgacggcancaccgaggaccagggggcacgcacagcgcaggccnncgggaccctacgtttctacggggagcgcgagttcatgagcgaccggaaccccagcgaagacaagcgcctcaaggacgaagaagtcaacgtagaacgcaacaaagcaggaaaagtgagcgagcacggaagaagaaggaggatcggggaggaatgcagaggaggagacgagaaggcaacggaagaagccaa

SEQ ID NO: 13223 - DNA, 586 bp, Glycine max
  misc_feature (44)..(44): n is a, c, g, or t
  misc_feature (333)..(333): n is a, c, g, or t
  misc_feature (411)..(411): n is a, c, g, or t
  misc_feature (432)..(432): n is a, c, g, or t
  Coding DNA Sequence Number=SeqID_3444
cagtattattatacacctcacccaccacaacacaacccaacaanaccatagattatcacgacatcatcccacggctagataatataaatctatgaaatatcccttctcctttatctctcgttctcgtctgtgtcagtgcgtggcgcgtggcacagcaccaacgcctagtgttcgaggccacgtcgacggcgagtctcggtgtgtgagtcgcgtcttggtgttgtggtgttcatgctgctgcacctcgtcatcgacattgacgatccctggggcgtctaaggcatctaccacagtcacaacacatgactctaacacaccgcacgctctccgccnctgacgagaccaacgtgcctacacacacatgagctgatcagtagacaccgctattatcacacactattgcatcactgncgtgcgccggtgcagtgtggntggtctctggacgtcagcgcaccccaggaggcggcatgacgcaaacatgagcatctcgtctctataccactgaaggacctggagtcttgcggagtactccactgctaacttcctccaaacaacgtatcatacacatcgcagtggtcagtcttgc

SEQ ID NO: 13224 - DNA, 596 bp, Glycine max
  misc_feature (356)..(356): n is a, c, g, or t
  misc_feature (434)..(434): n is a, c, g, or t
  misc_feature (463)..(463): n is a, c, g, or t
  misc_feature (515)..(515): n is a, c, g, or t
  misc_feature (569)..(569): n is a, c, g, or t
  Coding DNA Sequence Number=SeqID_3445
gatgcacgattgttatcacactgttgatggtgagtgactgatgtgcgcgccactcacgccgttgtgctattgactgtactatctagtgttcgatgagtgtcggatcagtgtgccatacgtacccgatacgctctacatgttatgattgtgagtccgtgaatgacatatgcactatgtctcgtatatgtattgctgatatatacatctcgagtacgagtaccgaagtggccgtcggtgcgtatactaacgcatatcgcatacgtcaggtgtacatcgttcgacgtgatctcgtacccttcggctaccgaatgtgtctagcctcagtatcttcgagtgagtctacatctgcgcgctangtttgtatcatgtttcgacatacgttcattgtactgaagtaaggcgacgtgacgtgatagcataagtatgctctgctntaccagcaatagccagacatgtctgatanaactgctcagacagtacgtcatcaacacactatcttggctagatgctagatnatgtcgcatgcgcgtcgatgtgatatagagtatcacacactgtgaatctgtgcnacgtagtcatgtagcactgtacggtta

SEQ ID NO: 13225 - DNA, 593 bp, Glycine max
  misc_feature (30)..(30): n is a, c, g, or t
  misc_feature (91)..(91): n is a, c, g, or t
  misc_feature (93)..(93): n is a, c, g, or t
  misc_feature (160)..(160): n is a, c, g, or t
  misc_feature (163)..(163): n is a, c, g, or t
  misc_feature (234)..(235): n is a, c, g, or t
  misc_feature (267)..(267): n is a, c, g, or t
  misc_feature (364)..(364): n is a, c, g, or t
  misc_feature (385)..(385): n is a, c, g, or t
  misc_feature (425)..(425): n is a, c, g, or t
  misc_feature (437)..(437): n is a, c, g, or t
  misc_feature (482)..(482): n is a, c, g, or t
  misc_feature (497)..(497): n is a, c, g, or t
  misc_feature (545)..(545): n is a, c, g, or t
  misc_feature (553)..(554): n is a, c, g, or t
  misc_feature (557)..(557): n is a, c, g, or t
  misc_feature (565)..(565): n is a, c, g, or t
  Coding DNA Sequence Number=SeqID_3446
tactactgtacatgcatcacgtgacatcantatcaactcacatcttatccagatctatcagtgactgtcagtatcatgatactatagtganancacagtagccgatatactaactgctaccctctacaacatgagaatagcagatcgcagacgcgatcgncgnatcagcgactctgataccggcaacatgcgaagttctcatcactactactgctcatcgtagacgactcatannactcatgtataacctcgatctacgatgtcatnctacccatacaacacgtcagagcactaccatcgagtcgacgtatcctctcgcgctatgcgacgggacactgctacatcgatctattcgatgcttatngtatgtggacgtagctaacantaacagttgcttgtctgagcgtcataatcgagcatcgttncctcatataaanatgtagatgcatagctcgtggtatcggataggattatgtgcgacncaatgtcgttagacntcagtaggcacgtcctatgataacgatacattgatactgtattgtttnatcacatnngancattcatnatcatgcttgtacttactgcgtgttgtc

SEQ ID NO: 13226 - DNA, 552 bp, Glycine max
  misc_feature (43)..(43): n is a, c, g, or t
  misc_feature (185)..(185): n is a, c, g, or t
  misc_feature (209)..(209): n is a, c, g, or t
  misc_feature (307)..(307): n is a, c, g, or t
  misc_feature (387)..(387): n is a, c, g, or t
  Coding DNA Sequence Number=SeqID_3447
acaactagcggtgtagtcgcgcgaccatcacactatcggtggngttcgggtgccggaccctctatgcggattatcgtactgtatgtgataattcgacgggtgctgggggcgacactgtctacctgcacacatacagcacaactctcggcgtctcttgttcggtgcctgttgtatccagcgacatngtgatagtctctcgctctcctgtngtgtgtttctacatagcgctctggatatcgttcgtggtgcgtagcttcgcgatctctccgtctctccgttcgagaggcgggccgcgtgcgtgagtgtnctcgggtgtgacgaagtatgattgcactccgcttatgcactctctgcgctggtatgtcgctcgtggcgatgtatatactnatcgtgtgtgtgttgtgttatacattggtacataggatgctgtgtgtggcggctgtgtgcgagtgcgtcgtagtcggcgatgctgtcgaagtgcctggcatctgctgtgttggcggcctaatataccgcctcggcattgctcacactaagcacgtccactatata

SEQ ID NO: 13227 - DNA, 355 bp, Glycine max
  misc_feature (159)..(159): n is a, c, g, or t
  misc_feature (243)..(243): n is a, c, g, or t
  misc_feature (288)..(288): n is a, c, g, or t
  Coding DNA Sequence Number=SeqID_3448
gagcaaattttactgttattgaaaccacagcattaaacttaagcttctgtgaaaagaagggcatttctatccctacccattattctttgacagttcaattaaattggttcaaagaactacttccttctctctacaattcttccacagactaccataaantagttaaaaactcattatttcttataaataaaattaggaaaaataatttcaactatcttttatgtcaacaaagaagcatagcangaattaaaacatttatgccggatataatcagaacaataactgganctatcaacaagttgattagttgagaggctcgcgcactcatgagtgctaggaatataccatgaagatg

SEQ ID NO: 13228 - DNA, 535 bp, Glycine max
  Coding DNA Sequence Number=SeqID_3449
tcactctctgcgcacaaaaacactaataaagagagagacagaaggtaccaattaattagcaaacccaaaagaaaaactcaaccttcttcgtagtagctttcatttgaagaaaccacaaaactctctcaacaccttttttacctcatcattctctctctctctctctttcccttttatttacggtgcttcttcttcttgttgctgactaactaacaccaacttctccaaaaaaaaaagactaatccatggagtatgaccttgaaaaccctcttggaaacttccacgaccatccctgctgcgatgttgcttccctcttcctcatcgaatacgaccacatccctcctccgaactactgctggagtatcaaagacagcgactactacatctctgctagaagagaagatgtcgcttcgatgaccccgcagtcctgcagcttctatcaggcgctcccttactaagctatcatctactaggagcgcttcctcgttaatcaaggaagattgttgccacagccgtggtgaaacaagcttcttgc

SEQ ID NO: 13229 - DNA, 549 bp, Glycine max
  misc_feature (94)..(94): n is a, c, g, or t
  misc_feature (400)..(400): n is a, c, g, or t
  Coding DNA Sequence Number=SeqID_3450
cgacttgtggacttctcgtgtgggtgcttgataaatattagggcgaatatcaaggacaaaatataaagagaggatgtatagcagaaagatgagnagtatggcgtgtagtctaataaaagagagtgtggagtatgtaaatacaattgacgcgacgatagtacagaacgcgtggggaaacagagaaaatgcgttggggtgagggaaatatacccgtgcgatgcgcagtcatgtgatgcggcgcacaactacttactctgtatatctacattacttatctaattgcactctaatcataacattaatatgatcatctacgatggtgtatagcgacggggacgaagagacatgcgacgtggtgcgttgcagctcataatatcatatccgccccgtggatataagnaacttacgagggtgagagtgggcgtatttatatctagatcaccatctccgagcggcgctcacaacgactacacacacgctgcgaacaacgatcgcgtacacagacaacgtggagacaacagagatatcatgagagcacaaacgccacag

SEQ ID NO: 13230 - DNA, 567 bp, Glycine max
  misc_feature (226)..(226): n is a, c, g, or t
  Coding DNA Sequence Number=SeqID_3451
agactgcttgcgtgcggttgtcagagagagtagagggaccggagagcattagatctcacagtaacatgcgtgctggacagagacgagatcgaggtaccgtcacatgactctatgcgctacacggcgtacgcagcacctacgcttatcatgctagatatatcgttgctacacgagagacgattacgctacttacggctgcgcattcgagaggtacgcgacgcacaancatcagtatggcggtcgaacgcacgtttgagttcagatagtatctatcgtctccagcccttgctcgtattggctcggttcagtagtggactcgcatctatcagtctgtatcatacatgatcaccactgtcgaaggtagaactgacgaacattctgctggaaggatatatctagcagctcctccgtcatcctcaataaatcaacacagacaagtatgttatgagagggtgggtggaggctgcaccctacatactactccacacgggcggaggagggagcgccccacacaccacacacagagagtgaggatcatcttatgtttaaatattcatctcccgcgct

SEQ ID NO: 13231 - DNA, 595 bp, Glycine max
  Coding DNA Sequence Number=SeqID_3452
gacctcaggtggatggttcgatctcggcagctatgaagttaatctaaatgatgttctcaagacaccgctgttggacagattcagaagagtaccaaaatctatgataaactgtttcgttaagaagactctgggagacaagtcggctatgaagataagaaagtctggaagacttgtcagagaaactcttaaaaacagtcttttctaagcccacgttaagcgtaagcgacctatcaataaaatattagcctcttaattaggaacacttttaattattgtctattgactatattgataattagatacctgcagtaatgcagaaactcattccaggcctttaaattgttaattcaccttcttcatctcagtatatcagcatccatctatctatctatttatctatatatacatcccttttctaatcattatattctatgtttatatctggacaacgtccaacccaagcaaatagtttcaatgatcttattgtgtgcatccttctccattcttcttcgtacttgttccttgcctttggttttgatttatatatcaacaaaggacagctgatttgatagtatgctcgtttgacttgatgtcg

SEQ ID NO: 13232 - DNA, 484 bp, Glycine max
  misc_feature (66)..(66): n is a, c, g, or t
  misc_feature (158)..(159): n is a, c, g, or t
  misc_feature (179)..(180): n is a, c, g, or t
  misc_feature (183)..(183): n is a, c, g, or t
  misc_feature (226)..(226): n is a, c, g, or t
  misc_feature (322)..(323): n is a, c, g, or t
  Coding DNA Sequence Number=SeqID_3453
tgggcgccattcaaaccggtctttttttattggctggcaagtgaaccggcgggggcccctcttccnccatgtggagaggagctgatttccacaggcacctttgagtggagccgaggatgttggcctgacgcggtttccaaaaagcagacggcggcgtnnggagtcggccaacccctggnnaancacggcagcattgttcgtgcaccggaacgcccggtcttggagnccgagcagtccgctgagaacgttggcgcacaccctcagggttgagcacgttgatggagcactgcccggcgttggccgtggccgtgccctcctcctnnccatggtaatggcgcggaacgacgatgggtggtgtcggcacgacgaccggcggttggcaataggtgcttccgcagccgtgggcggcgacggcggagaggaggaggctcagggcgatgaagagggcagcactgggtgccattgtgattgtgtgggtgtgcta

SEQ ID NO: 13233 - DNA, 500 bp, Glycine max
  Coding DNA Sequence Number=SeqID_3454
gtccgacagaatataccacgtgatactgatcggttcgcatgataaatctgatgttgatcatacagatagtaccgatatacactcgctaacaacattacgagcaagtcacttacacaggatgcaaacccgcaccttttgctttgcggaggagaatccacactgtataacctgtccaaggcatatactaattcacaattttgatgctttgggcggtaattcgacccgcggggatctgtacgatcatgaaaagttgacgaaagctatcaagcatgtatatgtcgtcatatccacgctagttcacctgcagtcttgccgatcagctcaagatcatcgctgacattaaggaagccgagaatgtaaagaaggcttttccctttcgtaattcggtaacgacgtgagattgtgtccatgcacgaggaagcagcaaaatctgcattagctatcaaagcccaaattcgacgcagcattgaagccgaaggcatcccctatgacgatacgtt

SEQ ID NO: 13234 - DNA, 346 bp, Glycine max
  Coding DNA Sequence Number=SeqID_3455
agaacaggtgtattcccacctgcaagaacctacaactactgaacagactcctacacactgttcatgtttaagataacactaatagaatttacagatcacacaatattccaacactaagccaaaccacactctataaacaaacaatacttcctataactaaacaaagatcttataagttctaataaaccagcttatccaagaaaacctttcttcaacccactaatctttaataataataagaagtccttaataaatttgaagctcaaataagtaaacaataaaatattatctatattaacaatcttacattactttattcaagctcttatcacaagtattagcccat

SEQ ID NO: 13235 - DNA, 335 bp, Glycine max
  misc_feature (267)..(267): n is a, c, g, or t
  Coding DNA Sequence Number=SeqID_3456
attcacagatcttattcactcctctttgtgtcttcgtcgttagctagcaggagaggtttgtgcggctgccatttcgattccaagagctctgaagaatggtgagaatcagtgtgcttaacgacgctcttaagagtatgtacaatgcggagaagagagggaagaggcaggttatgatcaggccttcttccaaggtcatcatcaagtttctcattgtcatgcagaaacacggttacattggcgagttcgagtacgttgatgaccacaggnctggtaagattgtggttgagcttaatggaagactgaacaaatgtggagtcataagtcctcgttttgat

SEQ ID NO: 13236 - DNA, 564 bp, Glycine max
  Coding DNA Sequence Number=SeqID_3457
ccagggttccatccgcggattggtaagaagcggattatagaaatggtttatttggatatgatttccgggggctaaaaatttcggcagagatggtcagttatagtgagcctctctcccaagtgttgattcttcggaagaggaattcgcgtggtttcacttgggcaacagtttctaagctttggttgtgttagatatcttttcttctatcggagctaatgtgggagtttccagttttcatctacctttggatacttataaacggtaatcgatataatcagagcgtcgttgagaacatgtacactcgccaatgctttggagctggatactcgccgggaaagttctgaggaggaggtttcgcggcggtgacggcttcattatttagagtggagagtgtagtaatcgtcgaggatataggcggtgaggaggatctcgattagggcgatgaggagaggggagaacctggagggagaggatgagtcttcttcgtcgagtaaggaaggaggaggtggagcgaagattaggtatcgccattacgggcagttgatattgcagactccttgagta

SEQ ID NO: 13237 - DNA, 498 bp, Glycine max
  misc_feature (171)..(171): n is a, c, g, or t
  misc_feature (259)..(259): n is a, c, g, or t
  misc_feature (383)..(383): n is a, c, g, or t
  Coding DNA Sequence Number=SeqID_3458
gatataacacatactcagagaattacagaataagaaaagaagaagagaataatagaatataataagatagagaatatataatataacataaagtaagcaagattgatgagagagagagacataaacgaaccacaacctgccagccccggacatgccgacacgcgcacacgngtagaggtgacacaacagcctcatatccttctactcacaaacagactcttataaatataccattatgttcttcgctctctttctaacntcacatttcattctccttttgttgttgcggggaggccgagaaggaggcgcagggagcgtgaggcgaggggagcggatgagtagagagaatgtggatagtagagagccgacacaccactcaccanccacacaccatatccttacactaacacgcctcaatcagaactatcaatacactcttaacacaaacaccacaaactcagaatcacataataaacaccatcaatctcataatcatat

SEQ ID NO: 13238 - DNA, 523 bp, Glycine max
  misc_feature (251)..(251): n is a, c, g, or t
  Coding DNA Sequence Number=SeqID_3459
ggttgtcagacgacgcatgcgcacacagacagagcgaagaggggacatacaacaaatcacagcgtggcaagagagaggcacccactttaggatgtagagtgaaagggcgtaatatcttgagtaagagggatatttgtacatatatccggaggacatgcgtctgcatactgacgacgcaaatgcgctgagcctccattatcatagtctgcctctatattcacagggtaagttttgtcctaactcactgtgcntgtcattgattgtacatcgggtctcttagaaatgcaacaacgccccccagagatcagacgacaacatgtactatatagatcagtctctgcgcgtagctagtgaaggctgtggcactgaactctaggtgctctcgcgagcagcttcttactctcgcggtatttttggttatggagaagatctacaagagggacagggaggaaatagcgatggaattacgcgcactcagcttccgcgggaactacacctatatattacgaaggcgcggcgcccg

SEQ ID NO: 13239 - DNA, 543 bp, Glycine max
  Coding DNA Sequence Number=SeqID_3460
aatagatttggaggtcgttactcaaagtcatttggttcgctttcacgaagaaggaggagaagaaagagaaggagaaggagaaggagaagaaggggaggaagagtattggcatgacggagaggttcaattgcagggccaaggatttgtatgaaattttgatggatgagaataggtggaagggttttacacagagcaatgcgagaattagtaaggaggttggcggtgagtttagcatttttgatgggtcggtgaccggaactaatttggagttgcaggaggctaagttaattgttcagagatggaggtttgggagctggaatgatggagttcaatccacagtgaggcttgtgtttgaggagcctgaagccggtgttacggttgttaagctgacacatactgatgtgcctgaagaggataggtatgggaatgctaccgtggtggagaacacggaaaggggatggcgggatcttattttccagaggatacgtgcggtttttggttttggaatttgatatttttcttgttgtatttcctgcgttgtag

SEQ ID NO: 13240 - DNA, 306 bp, Glycine max
  misc_feature (153)..(153): n is a, c, g, or t
  misc_feature (156)..(156): n is a, c, g, or t
  misc_feature (159)..(159): n is a, c, g, or t
  Coding DNA Sequence Number=SeqID_3461
tggaaaaggccccttctctaagaatctgaaacttggtattcatgaggattctcagaacaagacaaaacttgctgaattgctcaggtatcactccaccaagagtggtgatgagatgaccagccctcagggactatgtaccccaggatgaggaanggncanaatgacatctactacattactgggtgaaagcaagaaagctggttgagaatttcccctttcccttgaaaaagcttaagaaagaaggggtttccgaggtttcccctacatggttggaggcttttttgacccaatttggctgggttgggc

SEQ ID NO: 13241 - DNA, 468 bp, Glycine max
  misc_feature (310)..(311): n is a, c, g, or t
  misc_feature (335)..(335): n is a, c, g, or t
  misc_feature (338)..(338): n is a, c, g, or t
  misc_feature (351)..(351): n is a, c, g, or t
  misc_feature (412)..(412): n is a, c, g, or t
  Coding DNA Sequence Number=SeqID_3462
gttgggcggcgggtacaaacatatcgagaggggggaacggcgtgaggggaggcgtggggctgagagaacataccactatcaaaaccatagccagcctccacacaccaaccacatcttgtagtacattgtgtgggtgctggatattcgtgcttttctgttcttgatttgtcgtaggttgacttaggttttcttgatggttgtgtggagagagctctgagcttcatcgtataaattgtcctactttatatttactatatatctctgttgtctggcacgctatccgatccgacgttcgtcagcacgaccaacnncacacacacaccacacgaccacantgnacagccagtcacngcaccacccttgtttcgacgcgacacttcgtgcctcgtgtgttggccgttatggtaggatngagtatagttgtggatagtgatgagaggagaagggaacgcctggtgcaaataggca

SEQ ID NO: 13242 - DNA, 424 bp, Glycine max
  Coding DNA Sequence Number=SeqID_3463
acatctaacccacccgtagagatttcggcggccgatgtctccgctgtcgccgccgcggtctccacgccccctctcctactagcagtcagccagcaacctccctcacagcctaaaaatccacgccgtaacgacgactcgagggtcggacggcaggcggccatgagcagcgcgttcagcgaggagatactcgccgacaagctcgccaagctcaacaacacgcagcagtgcatcgaaacgctgtcgcattggtgcatttaccatcggaaggatgcagagctaattgtccaaacatgggccaagcagttccataattctggaaatgaacaaaaggtccctttcctttatctggctaatgacatcctacagaacagtaagcgcaatggcaccgagtttgtagaagaattctgggaaacatagctccaag

SEQ ID NO: 13243 - DNA, 588 bp, Glycine max
  misc_feature (26)..(26): n is a, c, g, or t
  misc_feature (129)..(129): n is a, c, g, or t
  misc_feature (171)..(171): n is a, c, g, or t
  misc_feature (332)..(332): n is a, c, g, or t
  misc_feature (441)..(441): n is a, c, g, or t
  misc_feature (563)..(563): n is a, c, g, or t
  Coding DNA Sequence Number=SeqID_3464
tactacatgactcactacctctattnaatatcgatatgagtcgtgctgaatgagaatgagtgagcgactgatcacaggcatgtgatcgatcagtacatactactagcatatctatctatagtcacctanatattactgctctactccgcgctccgtccctccgcgccctgnccggtcgccctctgtgtacccgcccccccccacaccttctactctctcctcttcacatcgtgtgattgtctgtccttcgctgtatatgacggatagcggtagatatatagatatatttctatctttgatctctatctctatagatactgtccatatacaanaccgaactaacatatcaacacgtctgtctctctcgtctgtcgtgatagtactctgtcgagcatctgtgtttgtgttgttgtctgtgttatgtgtgtatacgtatgcctntataacctccagtctacatgatgtaatcgtcgacgctgtcgttgacataccaagccggcgcatacatgaagtagtctgttatgttgcagttatttgaagagtcgcgcctgcgaccttgatantcacacgatagcacattactacgag

SEQ ID NO: 13244 - DNA, 455 bp, Glycine max
  misc_feature (347)..(347): n is a, c, g, or t
  Coding DNA Sequence Number=SeqID_3465
cgtccactctaattcacctgtaaatatctacatccgtcactcgcgtgtacgcgactcataatcaacatcgaaccgcggccattataacacacgcgttggtcgctaatcacaacgttaaatatctgtatcttgccctccttctctcattctgttgatccatagtgttgcgttatggtataataatataatcaattatactcgggtgcgcggtctaatcgtcataaatacaccataatgtataaacgcggcgctcgaaaaacggccggtgcggccaattcacgcatattctatatcttccacacgtgtctcttacacacatcctcgcgtcgggagtgtctcttacatancagtcctctatatcagtcgaccgctagtcgcgacataacaccactcaaaacaaaacgcgggccgcttattatcataagcatatatagctttgctagcggctgtgtcta

SEQ ID NO: 13245 - DNA, 234 bp, Glycine max
  Coding DNA Sequence Number=SeqID_3466
atggctccccgctgtcaaaggtggggggagtttcatatccccagcatggcttggtggcttcctccccggtggctttggttcttgccctctgtggcttgggtgcgcgccggtatttctggcctggggttcgtcgtctccctctcttccggggggctggcctgtggtggccttgtgttgctttcccttcgggctgccgtgcgctttggtgctttggctcgggctgggccgtgctcg

SEQ ID NO: 13246 - DNA, 516 bp, Glycine max
  Coding DNA Sequence Number=SeqID_3467
aatctgctaggcctcaacttggacagaacaggactatccctgcgtcgacacgaggcttcgctaccacagcatcacgctcaatggacacgactaaccccaacccgccatacggtatcaagcacaagcacatggactaccccgccaaggttgcgttgattggtgcgcgaggatacacagggcaggctcttattgagctgcttaacaagcaccccaacatggacctgcgccatgtgtcatcacgtgaactcaatggcaagaagctcgaaggttacaccaagcgacaaatcacctacgagaacctgtcagccgaggatgtcgagaagatggccgagaacagcgaagtcgactgctgggtcatggcccttcccaatggcgtatgcaagccctttgttgatgccatcaacaaaagtggcaaagacactgtcatcgtggatctgagcgctgactaccgtttcgacgagacatggacctacggtctaccggagctgattgatcgctccaagatttctgacgcta

SEQ ID NO: 13247 - DNA, 533 bp, Glycine max
  Coding DNA Sequence Number=SeqID_3468
gagttgcggaaccaaatcattgaagaggcaaatcaattcaaagaggatttccatagaaggagggagttaacctgtgaaaacaacaaagccgctaacagagagaaggaaaagctgtatatggagacgcaagagaagttctatgcggaagccagcaagaactactggaaggcaatagcagagttagttcctaaagaggttccaactatagagaaaaggagagggaagaaagagcaagaccctaagaagccaacaatctctgtcattcaaggtccaaagcctggtaagccaaccgatctctcaagaatgagacagatattgctgaagctcaaacagaacccgccagctcacctgaaactcgctcctcaacctccaccagaggcggctgctgctactactactgctgctactcctccaaagaatgttcctgaaaccaagcccaccgaggcagttactgctgcttaagaaaccctcttttgttttttcccattgctttcatgtatgtgattctctctttgcattccattacgtgtgtg

SEQ ID NO: 13248 - DNA, 234 bp, Glycine max
  misc_feature (186)..(186): n is a, c, g, or t
  Coding DNA Sequence Number=SeqID_3469
gaagggacccaaatggacccaattgagggtcgcttaaggcccctttattgacaattttttaaaagggaaaagacctgggaaaaccttgactcatagacggaagctggagaagacaccaaggaagagggtgtacatgatgaacgcttgtaccaagtgaagtttatgttgtgtgagcattattaggtntatgtgaggctgtgagaccatgtataagaagcatatggtatccttgaa

SEQ ID NO: 13249 - DNA, 541 bp, Glycine max
  misc_feature (34)..(34): n is a, c, g, or t
  misc_feature (68)..(68): n is a, c, g, or t
  misc_feature (314)..(314): n is a, c, g, or t
  misc_feature (331)..(331): n is a, c, g, or t
  misc_feature (395)..(395): n is a, c, g, or t
  misc_feature (466)..(466): n is a, c, g, or t
  misc_feature (476)..(476): n is a, c, g, or t
  Coding DNA Sequence Number=SeqID_3470
gactcacagctctatgtctgtcagaatacatctntatgctaatgatgttgtgcgagagtacacgtganagagtctcgatcggtgttgctggcttccatcgaggatgtctgactgcgctatgctacaattgctgagtgtcacgtctcgcgtcttgctgtacagactattctacactcacatagtaagacttgtaagcgtactatgcgtcgcgtcagcttgatcgtcacgacgaagcgtacgtaatgagtaggtggatcatatacggtgcggctggagcgtaggagcgctacacccgatactaggagccgatatantagacaatgcgaccatnctgacctgcatcgcagctgcctgacgtgacgtgcgcgcgcgctcgaatgcgcggcgagcagagntatgtcaacagaaggagtatcgtactgtcataagatatatcatggtgcagtaatgacgctatgcgtatgcntagtgggagncgtcagtgcacgagctggagttctcgtgctatattacagctgacgcgtcaccgactgaatgatct

SEQ ID NO: 13250 - DNA, 348 bp, Glycine max
  Coding DNA Sequence Number=SeqID_3471
aattattctgtttcagcctgtgtcatttttgaaaaccaagaaaatgtgacttttttttttatcgttatcaactttatctcttgatattttgactataaatggaaggagtgaggaccctgatggagtgacaattttttaaagataaaatagtccaatgctcttacattttcaataattgaggtgattcagtaactttttaatccttttgcaaatacattaaataacatataatttaaaatgcagggagtattttctcatgttttatatttttatttacgaatatattgtgaattattttcgttagtcatctatactttatttattgtccttaattagatatcgggtgcc

SEQ ID NO: 13251 - DNA, 478 bp, Glycine max
  Coding DNA Sequence Number=SeqID_3472
ttgcttcttccttctggaacgccgttttattctcccaccctggtttaccgtcaattcccctctcctccctccttcccccaccaagaatccccacttgtttttccctccctcccaccactgaccctcttccgtttcctgttttatattaaaactcaaccctttccatccgttcccccccaacaaagccgcacaaatatgtaccctcacatatcgagtaccctcctttctatatactttttattacccctcctccccgtcacggggcgcgcgttctaaccgccccctcccaacccattttatttgcattctcctctcctatgagcgtttttttccctctctctccattttattctcccaccccccatggagaccttcttcttgtaagtaagaaaatctctcgttaccgtgacctttacatatataaaaacacaataaattccttctctattatccttctgctatcttcctattggctctc

SEQ ID NO: 13252 - DNA, 508 bp, Glycine max
  misc_feature (348)..(348): n is a, c, g, or t
  misc_feature (469)..(469): n is a, c, g, or t
  Coding DNA Sequence Number=SeqID_3473
gataaggctgatatatccgcctttggagtgatactcctcgacctcattctaggaagcccaataaaaccacgcaaatgacgcagatgcttttagggatctgtcgcccgcaagcttaggagctgatgaagagggtaggaggagcgttgttgatccacgcatttcgcaaggcatgcttggctcactcattgaagacaatgatggagatttgtgtgaggtgcctggttaaagaccacgccgatagcccatctatagaagatgttttgtggacctcgcagtttgcctctcaagcacaagacgcatggagaggggattctcaaagtagtgaagggtccccaggctcagaatctngagggcccccctctcccattagtctcaccccacaggttctcacttttctcccccccttgtatatctcactatacccctaaaagattaaatggtcggggataccgccccctcacaatagtantagttctttatgtggtcaccccttcgctaaaaaaatctg

SEQ ID NO: 13253 - DNA, 592 bp, Glycine max
  Coding DNA Sequence Number=SeqID_3474
gagtttctgcatgtgaagccaggcaaaggtgctgcttttgtcagaaccaaaatcaggaactacgtcaatggtagcacagtcgagagaacctttcgtgctgggattactatagaagaggccaatgtctccaaggagactaagcaattcacttataaagacggctctcagtttgttttcatggacttgagcagttatgaggaaacacgtttaaacgaggctgatatgggcgacaagaccaaatggcttaaagagggaatggactgcaatttgctctactggaaggacaaggtcatcgattttgaacttcccattacagttcagcttaaaatagttgacgttgatcctggtctccgaggtgacactgcacaaggtggaactaaacctgccacactcgagactggtgcagttgtcaatgtacccctctttgtcaatgttggtgaagatattatggtggacacgagaaccggtacgtacatgagccgggtctgacacttcttccctattgctaacgactaaggaatgtgatatttaatgagcggttttgcttagactactctgattagttgagtgaacgcccagaattgctactatt

SEQ ID NO: 13254 - DNA, 275 bp, Glycine max
  misc_feature (26)..(26): n is a, c, g, or t
  misc_feature (31)..(31): n is a, c, g, or t
  misc_feature (90)..(90): n is a, c, g, or t
  misc_feature (93)..(93): n is a, c, g, or t
  misc_feature (133)..(133): n is a, c, g, or t
  misc_feature (142)..(142): n is a, c, g, or t
  misc_feature (155)..(155): n is a, c, g, or t
  misc_feature (194)..(197): n is a, c, g, or t
  misc_feature (202)..(202): n is a, c, g, or t
  misc_feature (204)..(206): n is a, c, g, or t
  misc_feature (210)..(210): n is a, c, g, or t
  misc_feature (214)..(214): n is a, c, g, or t
  misc_feature (216)..(216): n is a, c, g, or t
  misc_feature (223)..(223): n is a, c, g, or t
  misc_feature (244)..(244): n is a, c, g, or t
  Coding DNA Sequence Number=SeqID_3475
tatagtatatgtatgctatctatctncagtnactctctctagcatgacactagtctcactgctagatctatagtcactcttatctcattnttngcgtgcgtcgtatgtgatagagtaaagcagacgagacgancggcagagnagatgcagctgancagcgtacgctctatcgctgacgtcgcggtctctagcgnnnnggcgntnnnagtnccgntncctctanctctcacataccagacaaagntccgagcacgatcacacaacgattcgcacga

SEQ ID NO: 13255 - DNA, 557 bp, Glycine max
  misc_feature (130)..(130): n is a, c, g, or t
  misc_feature (209)..(209): n is a, c, g, or t
  misc_feature (211)..(211): n is a, c, g, or t
  misc_feature (260)..(260): n is a, c, g, or t
  misc_feature (270)..(270): n is a, c, g, or t
  misc_feature (291)..(291): n is a, c, g, or t
  misc_feature (334)..(334): n is a, c, g, or t
  misc_feature (339)..(339): n is a, c, g, or t
  misc_feature (435)..(435): n is a, c, g, or t
  misc_feature (508)..(508): n is a, c, g, or t
  Coding DNA Sequence Number=SeqID_3476
aatggattatgacttccactccaccagctgaggcgatatacactcatgcctcagtagaatatgattctatagtcgtcatcgcgacctagttcgacaccagtcgaatatcttgagcgcagaaggaatacantcatgtactacgaagcggccgactatcaggactactcttgtatggtttatcagacttagatacgcggcgtcatctcgtntnaataatacatcacagcggatattcatatagtactctcgattgctctganccatcactcncacgctcctctagctagcgancagtgtaccgacactccctaatatcaccactgacgcgcactcncatgngacgtgtcgttcgctcgcagcatcgtagagagataggagtcgacgacatcatctatactctcgtatatcgtctgtttacattacaatcgataagtnagtaccatatattgctcatattcactcacgcctcgcagatggtgatcttgtcgtgctgtgatggcatgtgcgnagtgtgttactactgaaagactagaagagccgcgagtcgtgtagaacga

SEQ ID NO: 13256 - DNA, 426 bp, Glycine max
  Coding DNA Sequence Number=SeqID_3477
atacatcaccctttccaatacaaagtaaaaaaaaaaaaaattaaatccccgaattcttcaatcaatttccatttccatttccattttcaattctttcattttctctctgtacggacttagggaaatacttttcctttgtttgaggtgagtcttcccttttctcaatttgggtgcccccaaaataattccaattctttttttcttagatttcctaaagggtatcagaaaaactgtgacttcaccaccatttattccgtttcgttcaagttcgggattgaaaaatccgaaaaagtgaaaaccctaatttgtgatttcgtgacccctttctcatggcggtttctacgatagccttgtacgcgagtccacccagcggcgtgtgttccacgtcgcaccagatcaactgccacgctggctacgacttcgaat

SEQ ID NO: 13257 - DNA, 489 bp, Glycine max
  misc_feature (231)..(231): n is a, c, g, or t
  Coding DNA Sequence Number=SeqID_3478
actcgcgtggcgtatcatctacacacacatcgcgatcctatactctacaacgactacgccacgcgcctacctatctctacacaatgagggttataacccgtctacgccgagtccacctaacactctcagagactcactatatactcacacatacgacaccgacgctatcctcgcgcgacgtctccgcatgcgtacatcgctcgcacactacataggacagcgctcgcagcncacccaccgtaaacacgatatacacacatcgcgcgcgacggatcatcacaagacgatctacatcacgacgcaggggctaacacacaaatcactcacatcgtcgtggacggatcataacaaactatatactaagacgatatagagataaccagtacagatgacaaacaaccacactacatagactacacggtcatcactcgtctcccatacatgtgcgcgttcagaaaaacacgaaacactgatacacatccgcatgtc

SEQ ID NO: 13258 - DNA, 191 bp, Glycine max
  Coding DNA Sequence Number=SeqID_3479
gctggtaggttatgtctatagtagaaaggcagctctatgtggcacataatataaaggctggtctactggtatgaggcaaaatctcatgacgggagaaatgactgtgggtcagataaccgctctttttaaggatcagatatcggctggctcggacaagtccacgcccgttcatatagatacaggtctccagc

SEQ ID NO: 13259 - DNA, 455 bp, Glycine max
  Coding DNA Sequence Number=SeqID_3480
agagaactagtctcaatttctcttttcattctcctctttctctgttccgagagtgtgtcctctcaaaatgtatccgagagtgagcagcagcaagctagcattcctccaagaggttggaactcctatgattccttttgctggacaatttctgaagaagaattcttacagagtgctgaaatagtttctcaacgtctccgttacgttcgtccagttgctttgcgtgtggtgtcaggtatttccattcagtcattctttattttttgttattatttattttgtttaattgcagtttggttgtgcagctggactttggaattggaatattgaattcttgagttcgaaacttgcatacttaaatattaacaagaggcagaaataattgacatatttagataccctatggcctatgcacgaaggaggactctttcgcatgatttcggaaacaggacaagagg

SEQ ID NO: 13260 - DNA, 510 bp, Glycine max
  misc_feature (443)..(443): n is a, c, g, or t
  Coding DNA Sequence Number=SeqID_3481
tatgttgttagtgtgtcgttatttttagttatactgcattctatatatcttcatctcgtcaactttatggttagtgatttttatatgtagaacggtgagttgtagatatatgagtaggagaggaaagatgcttctctgatactcacaattccgtattgtaagtcttatataaagtaaagaaagagagggggaagggaagttcaaaagagggcggggaggcgacaggataatgagcgcgtctatcaatctcctggagtccgggtaaattttcttgttgttgagtaggaggggtgatgtataaacttgatatgttgaatttgatagagtggtgagagattaatgagtgtagatttaataatgaagaatattaaataaaagttggttatattagggtagaataaatatcgagagattgagggtagtgggagagagagggagagggngttgtttttgttgtatctttctaatttcacttcctcccattttgtcgttttttctattactaataat

SEQ ID NO: 13261 - DNA, 543 bp, Glycine max
  misc_feature (118)..(118): n is a, c, g, or t
  misc_feature (130)..(130): n is a, c, g, or t
  misc_feature (353)..(353): n is a, c, g, or t
  misc_feature (364)..(364): n is a, c, g, or t
  misc_feature (392)..(392): n is a, c, g, or t
  misc_feature (518)..(518): n is a, c, g, or t
  Coding DNA Sequence Number=SeqID_3482
aactcgtacattcccattcatctgtctctattacactcattcatcatgcgcgcgtggcgccctcctagaccgacgtatacgagagtcgctgcggatcagaagccacactcaaaggagncgcgctacgtanatgtagtagtcgattagtatctattcgattactatctacttcgattcaatctacgctaatggattagaagaatatatagtagaatgtagaaagtataaataagtgaatcatataaataggatataatgaacttacgatgactagcatatgatatagcgtcttatatctcagacgtcttacgcgcgaggcgaatcacgggagcagagagcgacacacaatacgnaacaactcacngtatcatctaaacatctcacctcgtaanacaggcggagagagcactcatctctgatgtgacttagtactcagatatcatcgatacaacaaccacaagattcacaataatatcaactaccactctctccgctccaataagaaaacatatgccgtnatagcccaagcgagaggtcggagaa

SEQ ID NO: 13262 - DNA, 542 bp, Glycine max
  Coding DNA Sequence Number=SeqID_3483
atcatcacaagaactgtttcacagcaaaggatatgcggtgggcgcaacgccaaagttcaagaaaaccatgccattcgctgattcaacaacaactacaaaagatttggtgggtcgttcacagcgcaacaacggcaacacaaatgataaattcagtgattttagctttcagaaattgactcgaagccgacgaatcgcaatgactatgtccggcgtatgaattcattaaaacataaatctatatatatatatacaaatataatgatgaaaaagaaagtccgtcgctcattacgaagcagtgcaaatggaaaagaaaacttaacttaattttgtattttttttctctcttgtttattattatcaataacaacaacaaaaaaactttacacgtaggatattaaattcaaattattctctatatttttttttcgaattgaaaacaattttttctttgtattaacatttaatattagaaattcgtacatcgtgtagttctattcactgcatttgccaacaaatgcattggttgtgctcattttcatatt

SEQ ID NO: 13263 - DNA, 110 bp, Glycine max
  Coding DNA Sequence Number=SeqID_3484
accatctgctcccagatccagagatctcaagttccatcacctgttagcagtacaggcagaatggatggaacagtgcagactccaagcggcacgtgccacgtgttgctgcc

SEQ ID NO: 13264 - DNA, 489 bp, Glycine max
  Coding DNA Sequence Number=SeqID_3485
atcgcgaccggctgcctataatagagtaacagcagcgtttgagctatcctgacgcgcgcacacaccaccggcactacctcctagcggcaacatcgacctgccgacgctcgtccctccccctatacccattcgcttacctgcaccccccgctccaattaccttttcaactgctatgtacactcccacaatccgacacccctccatcgcgcgctgtatctgggagcccactcctaatacacaaactcacacacctgcgtacggcaagcacaccgtagagacagcggaccgcagacgatcatctcgctcgccgtgggcagaaaaaatacaaacgccgcggccacaagaatcgagaattacacttctcctgccttttcctcttctcccctttgtgggaaaaacacctctccatgacgctaacaacctctctcttttaaaaaatcctcatgtcaccgtccctaccttgcagatcctacacttagttctggtcgc

SEQ ID NO: 13265 - DNA, 297 bp, Glycine max
  Coding DNA Sequence Number=SeqID_3486
gcatatacgtcaggagctattccatggcatactgagagtgattctctgggcggtacacgggctcatatctcaggttgccatgctactattacgtgagtggaggattcccagctccccatttgggagtttgtggagtacatcaggatgatatacctagacggtgatatcccagcttgtgacaaccttgaccaccttttttacttgcctgaaaactacttgtatgcggggatagactgtatctggaagccaactttgagacacactaaacaatattagatcagatactgccagcaccgc

SEQ ID NO: 13266 - DNA, 553 bp, Glycine max
  misc_feature (165)..(165): n is a, c, g, or t
  misc_feature (407)..(407): n is a, c, g, or t
  Coding DNA Sequence Number=SeqID_3487
acttctcgtctataactcttactcatgatatacacgtaggtcgtcagagaacaaggcgcgacatcacatgtataatatgtatgacgcgctggtaggatagttatctgaacagtgatagtgtattctcaacgatgtgctggtgtgagaggatgagacgagcgtganctcgtagttggagtataatcgtagtccctacctcatcagatcacaccctacacgcacgtatagaactagcgtcgcagcgtatcaggcggatgatgcatacgagaacacaagaggagataaacgatgacgctcgcagaggcagcatgggcagacgagggatgtgggttagcgagatgagaatagatctgtcacaatgctgtgaagaaacaccgagcggctcaagatatactatcagatacccncctcgtggattagtatcggtacatcatgccatctttcccgacgcccctccccctcctacactcgcccgtggtgttagatgtcgtttgacaatatatctatctgtttgacgtatgataagatggtgggtgtctgtcacataacatat

SEQ ID NO: 13267 - DNA, 384 bp, Glycine max
  misc_feature (53)..(53): n is a, c, g, or t
  misc_feature (139)..(139): n is a, c, g, or t
  misc_feature (145)..(145): n is a, c, g, or t
  misc_feature (173)..(173): n is a, c, g, or t
  misc_feature (179)..(179): n is a, c, g, or t
  misc_feature (181)..(181): n is a, c, g, or t
  misc_feature (185)..(185): n is a, c, g, or t
  misc_feature (187)..(187): n is a, c, g, or t
  misc_feature (218)..(218): n is a, c, g, or t
  misc_feature (223)..(223): n is a, c, g, or t
  misc_feature (268)..(268): n is a, c, g, or t
  misc_feature (270)..(270): n is a, c, g, or t
  misc_feature (284)..(284): n is a, c, g, or t
  misc_feature (344)..(344): n is a, c, g, or t
  misc_feature (355)..(355): n is a, c, g, or t
  misc_feature (358)..(358): n is a, c, g, or t
  Coding DNA Sequence Number=SeqID_3488
aatccgaactagacacgacaccgtccgatgactctctcaggcttgctgtcgtnctatcacgatgtgctcacacatcaacctcgctacgacgactcagcgcagaatgaatctctagtgcgtcactgccgcctacgctgangtgctncgtcgcgctgctcgctgaccatctccgnagctcntngtangnagctgatctatcgacatgctcagactgcatncgcgngcgtgcgctcacatcggcatacgtcgtcggactgtgctcgatgcntngacgagagtgcacntgatcctcacacgacacgcgctcgatactatgactatgatagtgcaacgtgctaccagtntatcgtacaantantcacatcatcataccacactagtgag

SEQ ID NO: 13268 - DNA, 594 bp, Glycine max
  Coding DNA Sequence Number=SeqID_3489
gttggatccactcgtaaaagctctgtttgtcctccttgcgtctgtgattgcccacctcctgtatccctcctcgagatcgctcctgggcttgcaaatctcaccgttacagattgtggaggcgatgatccggagctcaagcaggaaatggagaagcagtttgtggaccttctgaccgaagagctgaagctgcaagaagcagttgcagatgagcatagccgtcacatgaacgttacactcttagaagctaagagagttgcgtctcagtaccaaaaggaagctgagaaatgcaacgccgccactgagatctgtgagtcagctagggagagagctgaagctttgctgatcaaggagaggaagatcactgctttgtgggagaagagagctcgtcaatcagggtgggaaggtgagtaaaaaactgattgcccccttctcatgtcaaaccctgaagtgtttttgtctgagaaaccgattttttcaaggaaaagtcctttatgttccacgtttctccatatatgtagtttttttttttttttgtttttgcctttggaatctgaatgtagctaaagaatggcttgtggccttgtattgactttc

SEQ ID NO: 13269 - DNA, 517 bp, Glycine max
  Coding DNA Sequence Number=SeqID_3490
ggttccggcttgactctgaatgttcggaaaatgtttgtagaaatggttgcagaattgtttgatgagtgtcagaggcagtttgacgagagggaggctatagcaagagcattagaagtgcagagggaattgaattggaaaagactggcagaggcagcttcacagaatagggtggatatggtcgcaccttagtagaattcctttactgccctaatcgggagtgttaattggatagctgaaggattgtatgcgctccgtgccactttcatgccgtgattaatcggtttctttctttcccatttattttctttttcccctatattttatcagttgtttaatcagcgagtttcattaagcagtgattaatgtagctttatagcgcagttggactattcgcgtcgcagtctgttatcattgtatgcagactgtgcagctgcggtaggttccacctgtcgactctctgttatcgttgacgactgtctgataggacatacgttccgtagtcagagggacagagcct

SEQ ID NO: 13270 - DNA, 562 bp, Glycine max
  Coding DNA Sequence Number=SeqID_3491
cagaggaaacaaacgcctccagggttgtccttctgaaacacagcgatggcggcgagaaatgctctgcttcgatacctaagagtcaacgtcaatccatcacctgcactcccttcgagctctgtacttcttcgtcgtttctcggaggaagtaagaggatcgtttctagacaaatctgacgtgacagatcgcgttatctctgtcgtcaaaaactttcaaagagtcgatccctcaaaggtaacaccaaaagcccattttattaacgatctcgggttagacagtttggacaatgtggaggttgtgatggcattggaggaagagtttgggtttgagatccctgataatgatgctgacaagatccagtccgttgatcttgctgttgactttatcgcttctcatcctcaggctacgtaagaagagattcaaaactctttcaatgtcatgcatcatgcctccagctgtgtctacagattttgattagccttaataagaacagaaacaaacatgttttttttttttttgctttcataagtatytgatgtgttcctcctgcatgattttacga

SEQ ID NO: 13271 - DNA, 595 bp, Glycine max
  misc_feature (175)..(175): n is a, c, g, or t
  misc_feature (326)..(326): n is a, c, g, or t
  misc_feature (347)..(347): n is a, c, g, or t
  misc_feature (370)..(370): n is a, c, g, or t
  misc_feature (390)..(390): n is a, c, g, or t
  misc_feature (420)..(420): n is a, c, g, or t
  misc_feature (431)..(431): n is a, c, g, or t
  misc_feature (464)..(464): n is a, c, g, or t
  misc_feature (514)..(514): n is a, c, g, or t
  misc_feature (544)..(544): n is a, c, g, or t
  misc_feature (566)..(566): n is a, c, g, or t
  Coding DNA Sequence Number=SeqID_3492
acttcattaattccataccagccttcagtgaccgctgtattatacatacacccgttctgccgctgtgttcgtctaatctttatcacgctcgcgacggttcgaacccccacctactccactatggggtgttcccctgttagcgatacacatatacatatcggccgccgccgcggtntgttatgatatgatgtagtgaagaggtagtaggagagggaaactccccgcgtgcatgctcctgcgatcgagacgaccatattgacaccactctcgcgccgtactctctccgcgtcgcttatccggagtgataaaactatcatacaattgantacgcgatttacgggacgcgngatacgtcgcagtagctatatantagcagccgcctggtgtggncggtatatcgttatcggatatggatattanttaatgtaacnccgctgtgtgtgcgtatgcgtcggtatgcgtcngagtcggcctagaacgtatatcacggtatgatgtagcaccggatacatantagtgccggccactagtatactcagagtcncgcatgcagtatgtgatatgangatgttccgtacaccgtgcgcgctaatga

SEQ ID NO: 13272 - DNA, 539 bp, Glycine max
  misc_feature (122)..(122): n is a, c, g, or t
  misc_feature (127)..(127): n is a, c, g, or t
  misc_feature (131)..(131): n is a, c, g, or t
  misc_feature (167)..(167): n is a, c, g, or t
  misc_feature (169)..(169): n is a, c, g, or t
  misc_feature (179)..(179): n is a, c, g, or t
  misc_feature (213)..(213): n is a, c, g, or t
  misc_feature (251)..(251): n is a, c, g, or t
  misc_feature (259)..(259): n is a, c, g, or t
  misc_feature (290)..(290): n is a, c, g, or t
  misc_feature (309)..(309): n is a, c, g, or t
  misc_feature (352)..(352): n is a, c, g, or t
  misc_feature (406)..(406): n is a, c, g, or t
  misc_feature (453)..(453): n is a, c, g, or t
  misc_feature (476)..(476): n is a, c, g, or t
  misc_feature (481)..(481): n is a, c, g, or t
  misc_feature (493)..(493): n is a, c, g, or t
  misc_feature (502)..(502): n is a, c, g, or t
  Coding DNA Sequence Number=SeqID_3493
gcacgctcttatactcttcgtattataatatgcacaactgctatttcagaacatcacaccacatactatctatctaatcttcatgatatcatcattcctcatctctacatgtgacactcacntctanctcnactcttgtgacgtagagagcaaggatgagatgtaancncgtgatgtangtgaattgtgcgtgctgcactcttatatctgacntccttcactacactacatacctctgcgcatgataatanacacttanatacttatctccactcacatgatactaattnattcacccacagacacatnaagataccaatagctcataggatcacgcgcggcgcggtgacangtcacacagactctcttactagttggagtgtgcatatgactgcgtgtcgactgncactctatctcatcatacacgagtacaaccatgtgggggatgtgccncagcagacctactactatatcanccacngtacgtcattgntgtcatatngactcataactcgttccgctcatgatctacttgaata

SEQ ID NO: 13273 - DNA, 556 bp, Glycine max
  misc_feature (182)..(182): n is a, c, g, or t
  misc_feature (189)..(189): n is a, c, g, or t
  misc_feature (223)..(223): n is a, c, g, or t
  misc_feature (225)..(225): n is a, c, g, or t
  misc_feature (378)..(378): n is a, c, g, or t
  misc_feature (415)..(415): n is a, c, g, or t
  Coding DNA Sequence Number=SeqID_3494
tgtggcatcaggttgagcccgacactctacagacacacagcgattacataatatggctctgcagctcaggcgtccgagtgacaagagactgggagtacatgggcgcatgcagaatagcgatccagatagtactacgtatctatatctactgcaactcgcgctctactacatccgaaagcaancagagcngtatctaagtcgactctgggtgtgtatagagatngngtgagcgacatcagagtgctgcgcaccacgataatcgacgagcgagacgtaggactctaacatacagacacgatcaatctcgacaatgtgtcgctggagctcattcgagtacatcgctcgcatactgctcgcagcgtaatatctatggcacantgtgccgcgtactgtgtgcatcgctattggtgaggcnatgacccgagtgcgcgcgtgtgccgacttgtgtgtgatgtaagacgcataccgtctcatgcgactcatccctaacttcatcatgtataggtgagacacgcgctcgctcggcagtcggactaagactccgactatgtaacta

SEQ ID NO: 13274 - DNA, 390 bp, Glycine max
  Coding DNA Sequence Number=SeqID_3495
agacggcacacaagggatgggactcccggctcagtttagatctggagaggcggacaagctccccgccagtccaccactgctcctgctcgtcgcacttttccggttgccgtcgactagcccacaatagaggaggcgacctccctttaccccgcaccatcacggcgccagaagaggatgagccccaggagcggccagagaggaggagaaagaagaggggaaggagatggaagtttcagatccaaaaaaatggatgaaaaaaatctgctcctcaaattcgcccaaagagtcctagatcggggatggccagaggaggaagacgacggggagcatagacacctccggatctccaatccgcttctccccccgaggctgtcgtaatgctcctcgtct

SEQ ID NO: 13275 - DNA, 564 bp, Glycine max
  misc_feature (174)..(174): n is a, c, g, or t
  misc_feature (274)..(275): n is a, c, g, or t
  misc_feature (411)..(411): n is a, c, g, or t
  misc_feature (518)..(518): n is a, c, g, or t
  Coding DNA Sequence Number=SeqID_3496
atatctgtgtcctcatctacatgctgcgggaatgcttagtgttcgggtggcagcgtcgccggcacatgtatactatgacgatgacgtgatattgtagcgggtcttcttgagttgtacggtggatgagaaacgcagcagacagaccacgtctgctgcacggatctagagcgcggngggatggtaggatcggcggtgtcttgagtcatatggatggttgtatataaggagtgagccagtaagtctgagataaggtcccgagcaggcaggggtgggnngcgtatatgcgcggagtgagcgggtgtgtgctgggggacgaagataaagaaagtgtttgagaaagggttggtgggctatttgcgagtgatttacaatattatgtatttcatattcgtgagaatgtgcatgaggagnatttattcatgtatatataaagtgattggtggcgtgtggtggagcggatgtcggtgagcggggttgttgttgtatatataatctcgtattgatcatttatcgctcgnctcgtctgtcagcatactacggcctctcatctctctaaatttacaa

SEQ ID NO: 13276 - DNA, 568 bp, Glycine max
  misc_feature (28)..(28): n is a, c, g, or t
  misc_feature (102)..(102): n is a, c, g, or t
  misc_feature (104)..(104): n is a, c, g, or t
  misc_feature (134)..(134): n is a, c, g, or t
  misc_feature (139)..(141): n is a, c, g, or t
  misc_feature (176)..(176): n is a, c, g, or t
  misc_feature (189)..(189): n is a, c, g, or t
  misc_feature (191)..(191): n is a, c, g, or t
  misc_feature (193)..(193): n is a, c, g, or t
  misc_feature (216)..(216): n is a, c, g, or t
  misc_feature (220)..(220): n is a, c, g, or t
  misc_feature (229)..(229): n is a, c, g, or t
  misc_feature (237)..(237): n is a, c, g, or t
  misc_feature (265)..(265): n is a, c, g, or t
  misc_feature (269)..(269): n is a, c, g, or t
  misc_feature (273)..(273): n is a, c, g, or t
  misc_feature (281)..(281): n is a, c, g, or t
  misc_feature (343)..(343): n is a, c, g, or t
  misc_feature (346)..(346): n is a, c, g, or t
  misc_feature (349)..(349): n is a, c, g, or t
  misc_feature (358)..(358): n is a, c, g, or t
  misc_feature (388)..(388): n is a, c, g, or t
  misc_feature (402)..(402): n is a, c, g, or t
  misc_feature (443)..(443): n is a, c, g, or t
  misc_feature (453)..(454): n is a, c, g, or t
  misc_feature (481)..(482): n is a, c, g, or t
  misc_feature (524)..(524): n is a, c, g, or t
  Coding DNA Sequence Number=SeqID_3497
tcgcgctgcatcacgtgatgtgattgtncgcacaactatacgacactagctgtcggatgacgcgtgacagtcgtcactcattctcatcatgtacgtagaganangtgagcatacgtagtgtagcgcgtgtgagnatgannnaccccgatcagatacgcgtagtcagagcgtagcgntaccactgtcganangnagcacacactgtctgtcactgcnactnggttgtagntactagantagtcacactgtctagatgcttgtcgcngctntacngactccanaagtactactttggcatatgactacgtctatctacctcattaatgcatgctagatcagacgntantantcactctanctcccattcattcatagaatcagttcgtcncagtacagatcagngtcagaagatagtctccctcgtctctcatgtcatcattacncccgtctgtnnacagcatgcaaatctactgctattcannagttgagatcacgtactccattcatccttctgcttgtcgtcntgctgtgatactgctactgacttgctatactgctcgtgatcgtt

SEQ ID NO: 13277 - DNA, 485 bp, Glycine max
  misc_feature (110)..(110): n is a, c, g, or t
  misc_feature (265)..(265): n is a, c, g, or t
  misc_feature (346)..(346): n is a, c, g, or t
  misc_feature (384)..(384): n is a, c, g, or t
  Coding DNA Sequence Number=SeqID_3498
atacgcgacgcgtgaggcgcatatacgacgagctctctatcactcatactcacgatcatcgcatgactgcgcgtctgctatgctctcacagcgtccatacgtacatattnagtaccttatagcgattgtcttcctgactcgcgacctgcacacgcaatcagcgctcatgtgcacgtctgctcgctctactgcactctcgatctcatcactgtgcttgcaggtgcgcaaatgtgtcgcgtctcatagtgtgaactatgtctatctnctataatctactccctcatacgcctcgctgtgtgtccatctctctctcgtacattctcatgtctatctctatgacgtagcnacaccgacacgtgggacacgatatgccaaatgactgangctatcacgcacctctcctgctctatatcctgcttcgtctcatcgcgccggctctctcatataccgacactcctccatctatatactcacccgacgctcgt

SEQ ID NO: 13278 - DNA, 473 bp, Glycine max
  misc_feature (28)..(28): n is a, c, g, or t
  misc_feature (138)..(138): n is a, c, g, or t
  misc_feature (148)..(148): n is a, c, g, or t
  misc_feature (201)..(201): n is a, c, g, or t
  misc_feature (227)..(227): n is a, c, g, or t
  misc_feature (326)..(326): n is a, c, g, or t
  misc_feature (347)..(347): n is a, c, g, or t
  misc_feature (380)..(380): n is a, c, g, or t
  Coding DNA Sequence Number=SeqID_3499
ttctgcagcgccacactcaaatacaccngcagcacagatgcgaacaaacgcgagggcagacacctatacaatatcatagtgttcgcgcatgatgatcgtcgatactagtctccgttgtccttcctctctctccgctcntctgtccgtntctattgtgtgctgacgagtgcgcgcggcgcgtggcgctgtacgctgtacggngcctgtatcgtggtgcggtgtcgggngacactgtgacgggcgcgacatactcctgtcggctgactctctgtgttgttgcatcatcatctttggtctgcgtggcgcccgtcgccagacatcagaancggctgtcgcatcatctctantcacgcatgcgtgtcgctccatatgcaccgttncatatctcatacggactgacgtctatcgtatgccgcgcgccgatactcctgtcagacgtgcgttgtatcgtatgtcaatggaggcatgcgcag

SEQ ID NO: 13279 - DNA, 528 bp, Glycine max
  misc_feature (220)..(220): n is a, c, g, or t
  misc_feature (222)..(222): n is a, c, g, or t
  misc_feature (269)..(269): n is a, c, g, or t
  Coding DNA Sequence Number=SeqID_3500
gcatggccgctttcgttatcggtcacgcactgcccgtgctgttcccccgctcctgcctgttgggggtgtccgtagctctgcacggcgggcggcgccggcccgagctggcgtaccggcgactctggcacgacctcttctccgccgctcacgctccgcttccctttctttcttctcctctctcctcccttccccgctcttttacccttctcgctaatatccncncccacatctcttctcaagcccgtttcgtgccgccgacctgttacacnttccccgtcaatttattcttatttctattacacataaccctatcgtatattagattcattcaacccaccataccacaccctccatctccagaacgctacggcagtggtgcgtagaggagagaaagaggttcagtcgtattggtgagatttactctcgctacgctcgcggggaggttgtgcgctgctgttgtttcttgaggaggacgttgcgccggcctctcccgtgacttgaagtatccctcccgactattatttgtaa

SEQ ID NO: 13280 - DNA, 442 bp, Glycine max
  Coding DNA Sequence Number=SeqID_3501
aacaatggcccaaattaccagtttgggaattaccctcagaggaagttatcatgggagagaaaattgaagatgcagcaaagagggcagtatacaaacaagcgaatgttgaaatcaagttggagggagttttcactctaagacacacatctcagatgcttggaagcgtaagagcaattatagtcgcatcaccaattgaccctaatactattaaaacaacaaaaaatggagaaccacttgaagtaaaatgggtttcattatttgagttggattctcttccccacttctatgtagaggaagttagttatattagacaaattgctgcaggcgcccagatccaccctttgtccgtaattaccgagagcgaatactcactaggaagaccaacgaaatttctcagcatgctcaccagcccatggtggtatgcgacccttggttttgtaat

SEQ ID NO: 13281 - DNA, 402 bp, Glycine max
  Coding DNA Sequence Number=SeqID_3502
gttctacaagcaaagcctggacggtggcggttagcatcggagtagtagagacgttgaaagaccagttgggtctttgtcggtggaactacatgttccggtcggtgaatcagcatctccggaacaatgtcagaactgtttctcaggggaaaaggttctcgtcttctgttgccgccgctaactcgtctggtgagagtgaaaaggcaaagcagtgtgaagaatcgcttagaacggttatgtatttgagctgttggggtcctaattgattaggacttagtttataatgtatagttctgtaatttctaagatggcttggagaaatggagttttaatataatttttggttcgaaaaagaaaaatgtcaatgaaatatgagatgagccgatccaatcacccaaacaaaaa

SEQ ID NO: 13282 - DNA, 434 bp, Glycine max
  Coding DNA Sequence Number=SeqID_3503
gtcgattaagtgtgttccgtggcatacggaattcagggttctcgagtgtcttcacgccgttcatcttcgtctgctagtttcgaacgtcgcgaggattcgaaaaccatgggtttcgcagcgatcgggaactctccccccaagacgtacgggcggaaatccggctcctcccgtgtgggcggaaactcgcacgtgctgatgaggatgcatgcacttaactgctgtagaaagtgcttccgtcgcaaagcctagaaaatcggatttatctgttacagttaaaaaatctggagttggttttgcagttgaatttattttttttttttttcttatagatttttagatttttatgttgtactggatcttataaatgttttatgattctgtcgtttaacatctgaacttttatcaaaaatcttggttctacttctagatacttt

SEQ ID NO: 13283 - DNA, 580 bp, Glycine max
  misc_feature (341)..(341): n is a, c, g, or t
  misc_feature (442)..(442): n is a, c, g, or t
  misc_feature (516)..(516): n is a, c, g, or t
  Coding DNA Sequence Number=SeqID_3504
tcttgttattatcttgtggcatcactgacacactgattggtgtgagcgcggctatcactggaacagcggctgagtgtgcgatcgacaaagcagagaaatggggttggcaatcggcgggagatttagcgattcacgtgattctcagtacgctaggagcccaagacactgccagagtcgcgcgtgtgagcaaaaggttctgttcttccgcttcccacgacactctctggatccctcactgcttccacgccctcgctctgacacaagccctcgatcatctcggaaaaccctctctcttcctccgaggaatgctatcaagcatggccgaggagcttttggtatgnatcctcggtctcttgttaaccctgcaaaaaggcgccgccctacaataacaccctggttgaccaataattttcctcaagctcaggccactctttgtccaggngctactgcaacccgactttcccccactcgggggaagtattcaaagccggaaattggcccctttccctccacggnatcctttttctcgtttttccaatttgggtaattaaattgccttacgcctcatcctgaataatta

SEQ ID NO: 13284 - DNA, 275 bp, Glycine max
  Coding DNA Sequence Number=SeqID_3505
cgcgagccgaataaactatacgtcacactttactacaacacagattttgatgaattgctgcgaacacttgaaggcagtgaatgaaccaacgcacttcacgccccaactttttctacctccactgctaagcgagaaaactcacctagagaaatgacacgagttcagactcctaatctacctggtctttctgatgatcttgctgttacttgaatgattcgagtaccccgtatcgagcacaggaaactacatttagtctacaagagatggcgccacct

SEQ ID NO: 13285 - DNA, 490 bp, Glycine max
  misc_feature (424)..(424): n is a, c, g, or t
  Coding DNA Sequence Number=SeqID_3506
cccggggccggctctctataagcggggttcccgcccgtttttcccccgggaaaagggcccggggcccccccccccttaaatggggtttgcccccccttttgccccccccgggtttcccctttttctttccggccttttttttttggggaatttgggggggaaaacattttccccccggaacccctttttcccccttttaaaacaaaccggaattttcccccccctaagggggccaaaaatgggggccccccccggggggggccccctttaaaatttgggggtcccccggggcccgggaattttttttttttttttttttttttttttttttttttttttttttttttttttttttttttttttttttttttttttttttttttttttttttttttttttttttttgggttttattttttttttntaaaagttaaagatgaataacaatcataaaaatgttttaacgcgataaagtcttaaactgacccct

SEQ ID NO: 13286 - DNA, 437 bp, Glycine max
  Coding DNA Sequence Number=SeqID_3507
ggaggatgcccctcttttcggaacggttgtggctatggacgaccctttcaccgtggggccggaacaggactcaaaacttgttggcaaggaagacacaaggttacacttcaatatcgcaggaagagaagggacgaataatggtgatgacgatggcgttcaccgatggagatttctacggcagcaccatcagcgtgttggggaggaacatgatgatgagtgaacactgttagggaaatggctattgttggtggcactggggcttttcgttttgcacgtggctacgctcaggccaggcaatactctgttgatttcaccaaaggagacgctatcgtggaatacgatgtattcgttaaccattattaagttctacgcaccccttttatagtggaatacgataataggtgatagctgcttagaacacctgtattcgtgaaata

SEQ ID NO: 13287 - DNA, 467 bp, Glycine max
  misc_feature (290)..(290): n is a, c, g, or t
  Coding DNA Sequence Number=SeqID_3508
gggacaccgcggaccgcataagacaggcgcgtcaggtacgtgaataacaagtatctgagatcaacccacacccgcagaattgcgagttgcgcgactggaagcgccgtatagacgtcgtggcgcgctccctacgcaaccagagtgtatttgagctggatacgcgttaagtagatgagaggacgaaatctttctcatccgcaggctcgcctgcctgacagcagcttagtcactcgcccacgccactcttcgatctgttgtgagatatcactagcatgccaacaatcctcatngcttatcggagcaccccgacacagccgcacataaacccgccgaacctctcatagcataccgacgtcggccggcggggcggagtgagcgccacgtacacggtcacgagtcacaaatcgacggacagctccccagtcgcacgcaatgaaaagcactgagtcagagcattgagcgcgtaa

SEQ ID NO: 13288 - DNA, 528 bp, Glycine max
  Coding DNA Sequence Number=SeqID_3509
gaaactgaggctaaactccgaaactaaccggcagtctaatgacgaagagcttaatgacaaaaaagctctagggattgctgaaagcatgcctgagctacgccacctccagctcgttgggaacacattaaccaacaggggcttgaccgccattctcgacggttgtcctcacctggaacaccttgatttacgcaagtgtttcaacgtaagacttgaaggggatctggagaagagatgctccgagaggatcagagagttgagacgcccggatgagtcaaccgctgatcacccatatggatttaacattgaggatttattaggccccaacaactattattgggatgacttaagcgctggttacccttatggagctaacgtctatgatttatcagactgcagcgattattattcggatgagttctactaagtctactagatactgaacaatgcagaggcacatgtggttttcgcttgccttgttcagattcctctgttctttctgtttagtagtctctttaactctcgtttgaa

SEQ ID NO: 13289 - DNA, 416 bp, Glycine max
  misc_feature (88)..(88): n is a, c, g, or t
  misc_feature (331)..(331): n is a, c, g, or t
  Coding DNA Sequence Number=SeqID_3510
ccacctctcttaccattttcaaaattcaatacacacaccaatcacatgtgccactttcgcccaagatgttctagaaggaagaacaaangcttcacaagaacacaatcacaagcatcaacccctaatatttagaccaactagccttataaatagaaacataacaactgagagagaaaaaatggcagctcaagtcttccaacctagtcataagatgccaactatgagcattgaagaagccaggctaaaagaaatggaaataataaacaaatggcaagaaaaaaatgtcaaactcataaaagaagtcaattcatcttagcacaatgatagaaantcaaagctgaaacaagacgataataatgaaaatgatgatacgtgacaggacaaaacaagggcttgggatgactgggaaaatgata

SEQ ID NO: 13290 - DNA, 359 bp, Glycine max
  Coding DNA Sequence Number=SeqID_3511
tatcttcatggtgagtttcggtggcatcaatttcacaggaagaagttgaagtgcacttggccatacctgattgaatcgattttctcaaacaacattcaaatctcaaatctaactgtcctcaattccacattatggaacgttcatactgtttacagtatttattcttttgtgcaaggcatcaccatacttgtctctgtcacatcttctaccactgatggcatcaatccactattcttgctcatatgtaataataaaagattgctatatcatttctggtgatgtctgtctggctgtctactagtggtatgggatgacttcccgataaaattttgttgtgccactcaactgctaatgatatg

SEQ ID NO: 13291 - DNA, 562 bp, Glycine max
  Coding DNA Sequence Number=SeqID_3512
gaagacttgggtgacttcttgatgaaccacaatcttggagatgaagaacccttaactcctgaagaaaaggaagatattctacatggactcaagagattacctccccaatacttaaaaggtatgtggaatgtcgtcactggacttattcaaactcctgaagatgaagaacagtccccaacccttaagctcagacaattggatagttacttaaagagaaaaactaatattattttccaagaagaacaaccaggacaacaggatgatgatgaataaatcatcgaacgctatgctgactttttaaaagaaggtcagaaaatagtaagtaacctctgccctaataggttgagagaaagagaaacaagtgaacacaacaaactaattactcttaatgaaattatttaacaaataacagagacaaatttgatgagtgtggttcggtttataaagagctcatttgtcgtttttgatttgacagtaaatttttttataagggatatttctgtctttgttataaggtcttatgagagattgcatcaatagcttttattattacctcgtaatc

SEQ ID NO: 13292 - DNA, 470 bp, Glycine max
  misc_feature (65)..(65): n is a, c, g, or t
  misc_feature (85)..(85): n is a, c, g, or t
  misc_feature (110)..(110): n is a, c, g, or t
  misc_feature (241)..(241): n is a, c, g, or t
  misc_feature (269)..(269): n is a, c, g, or t
  misc_feature (316)..(316): n is a, c, g, or t
  misc_feature (322)..(322): n is a, c, g, or t
  misc_feature (324)..(324): n is a, c, g, or t
  misc_feature (334)..(334): n is a, c, g, or t
  misc_feature (350)..(350): n is a, c, g, or t
  misc_feature (382)..(382): n is a, c, g, or t
  misc_feature (389)..(389): n is a, c, g, or t
  misc_feature (405)..(405): n is a, c, g, or t
  misc_feature (426)..(426): n is a, c, g, or t
  misc_feature (428)..(429): n is a, c, g, or t
  Coding DNA Sequence Number=SeqID_3513
tcggatgtgaccaagtacgcgtgcgagagtcctcgtgagtgtgagctctgagtagagaacgttgngtatgtaggaagattgatangacgactgtatgcttccgcgcagcnctcagcttcgcatattgagtagcgtgagacgcagctcattgagagcgtagaagtatgagagtagatgcggcatcgatgaggctgacttgacgttccatatgatgacatgcgtaatacagcagcgcgtgctncagctaacagagcatgacgatcagctantgatagtgagcacacgccctgctcgacatcagccgctcgcatacgtncttatntnatctttagcnttcatatgattcttcntgagatatactctaccgtcgcgtggagtgcgngggtagncgcgtacgagtgcagngagaatacactcacatcatcncnncacaccctcttgttgtcgctcgtcatgtgttgtctttgata

SEQ ID NO: 13293 - DNA, 186 bp, Glycine max
  misc_feature (122)..(126): n is a, c, g, or t
  Coding DNA Sequence Number=SeqID_3514
caaatgcgtgcagcggtttgtatatgtgacatggtgacagttgcttgacggttgaatcattggttgttccagagcttgataagaaatcattttcgccagaccctggtaattttgaggacagnnnnnatgcgagacatttcattgattctctacaagatgaagttcgaaagtcaaaagagtgcccaa

SEQ ID NO: 13294 - DNA, 586 bp, Glycine max
  misc_feature (48)..(48): n is a, c, g, or t
  misc_feature (259)..(259): n is a, c, g, or t
  Coding DNA Sequence Number=SeqID_3515
actctatatattccgcgacctacatctacaggacaggagatgacacgnagtacgagcgcgctcatcccgctgtccaatgagtaccacgactggagagagtatcgctaacgacgtcgcggctagacggagagagggagcacaagtgctaggagttgtctcatgaggtgatgagaaggagtctggatacggtgaacggtaaaacgatagcgccgacgacgggcagcagcgacgttagcacattcaaaggagagtagtgtangtggtttgctgacagtagaaggagcgagtgagcggagagtaggggtcgtagcagcgatccgcgcaacgcgcaactacagacaacaggagcatgagagtcttcgatatctgtggagagttatgagagaacaatgtgatcagaatgccatactacttttgccgccaggtagcgggatccgtattagtgctgagatatggtccctttcttcctacaattagtattgctgcgctcagtggttataattttcatattagtcttgtataattgtgttgttttcgcgtagtattaagaagtgtcggagcacattattctgatccgtggtaccct

SEQ ID NO: 13295 - DNA, 554 bp, Glycine max
  misc_feature (73)..(73): n is a, c, g, or t
  misc_feature (141)..(141): n is a, c, g, or t
  misc_feature (278)..(278): n is a, c, g, or t
  misc_feature (317)..(317): n is a, c, g, or t
  misc_feature (324)..(324): n is a, c, g, or t
  misc_feature (457)..(457): n is a, c, g, or t
  Coding DNA Sequence Number=SeqID_3516
gtgagggcacaatagagcatatacatatcagaaaacaccataatacgagtagaagcaggagcgggtgggtgangaagggtgagttgagatagcgtgaggttgtataagttataattaacataccgtcagtgatggagtaangatatcaactctcccactccttcatctaaaatgttatgttaaatctctgacattgagccatactcatgggctactatctaactatgctcgtgttttgtgtgttgctgctgcttcattacgtatacgagtcgtatggngtatgttgtattctaggtgcgtggatatgtacatggtcnctccttngggctgctctcccctttctcacatctatcagcgctggccagcgccgctggatcgtctatctataataatcacaaaccaccaataacaattcacgatatgaagtaagtaatagacagaaacaacataaaagtanctcctatagtggttgtttcgacggtaactagaatattagatgtgggacgggtcatgggggggcaagttctacgtggcgtttgatactttgttgcaac

SEQ ID NO: 13296 - DNA, 483 bp, Glycine max
  Coding DNA Sequence Number=SeqID_3517
gaactggctcagtcatctacgacaagcagactttatcctcgtttgctgtcatagccagggtgtgcccgttgctatctcgctaatggccaaactcatccagttaggctgcctcagtccaaacgctcgcatcggcctctgcgcgatggccggcatcaacctaggccctttcctcgactacaagtctcgtctctttggtggtagcgcactcgagctctttgacttctgcgacaacagcagcaaagtctctcgcacatatgcccagtcgctcgacatatgcttgagacacggtgtccgtgtatcttatgtcggcagtcttgacgatcaactggtcagtcttgagagtagtcttcacgccccgctttctcacccctacgtcaatcgcggtctcttcgtggacggccgcttgcacgcccctaatttcttgacccatcttgtcatctttgctatcaagttgcggaaaactcgggagtctctgatcagggc

SEQ ID NO: 13297 - DNA, 482 bp, Glycine max
  Coding DNA Sequence Number=SeqID_3518
gataaagtcttaatagctggatttaaacaaaagggtcataccataaataatattcctaaaatcagattcaaagtcgtaaagatttctaatatatctctcctagctctcttcaaagaaaagaaagagaagcgctaatcttagtcttataaaacatatcctctctagtttctccaaaaaaattattataaattttacttcataagactaaataagttctatgaacaatgttgtatctctctaatacaatttttctaaactaaattaagtcatatctcatacttgaactccattgttatagagaatactttgtattaagttcggtcgaatgttacctcgaaagaaagagagagaatgagaaacttaagaagggacggcggagcgaatgcggcgtgtatgagtcgggggacgcgcgctcagtgggcggctgttgcaacaggcggagtgaaagaggcgtgcgtggccaactgagtaccgtgcaggag

SEQ ID NO: 13298 - DNA, 374 bp, Glycine max
  Coding DNA Sequence Number=SeqID_3519
taagactgttcaacggcagagtgaaatggatgagaatttttcatcgctgctctatgaaactttaagaatccttaggtctcagatagcggagggtactgcaggatgtggtgtacaccacatatttaaaaatgaaacactgaaggaaattagcactcggataccaaggacaaaagaagaacttttggagataaatggcatcggcaaggtgaagctcaacaagtacggggatcgtgtacttgcaaccatagaggagtttctcaaccaatttccaaacggaagcaagagaagcagcagcagcggcggcagtaacgagcaaaatgaggccgtgaagaagcgaaggggcttccccgccattcacacgtctggtaacggca

SEQ ID NO: 13299 - DNA, 524 bp, Glycine max
  Coding DNA Sequence Number=SeqID_3520
cagcctgcgtggtgggcggcaaaaaaaacatttttctccctgcgtgaacaaacaagaatcgcaaaacaaattgttggtgtggactgctaaaataaaaaagaaaaatgacaaaaacccttatgttttaaacaacaaaaaataaactcaaaaaaaaaaaaagacaacaccagagaatttgtttacttatgtttttctttttttttgtgtgtgtattgacgtgacttcataactaataaaaagaaaaaaaacaaaaagaagaacaaatgtggtgtgggggcgggggcgggggggggggcccgggtcggggagggggaagggggcgggcggggaggcgaggagaaccagaaaacatagaagaaaagcaacaaaaaataaagtaaactaaaaagacataggcaggcgaagagacgacgccaggtgaaccaaaaggagaagaaagtaaagccagaggagggaggggagacggccggcgcggagggaggccgggccgtgggaagagcagtgggtgggagggtcagcggcta

SEQ ID NO: 13300 - DNA, 565 bp, Glycine max
  Coding DNA Sequence Number=SeqID_3521
ggactcatttctactctcaggacaaccaatcgagtatatggaagtatcagaatgtgccggtcagtgcggcgggcgtctacgatctcattcgcactgcacaggcaggagtgccgagtcagagcaccaaggatagcatacttatctgggtgcgtcttgacagtcgcgtgccatgctcatgttggagctcgcctcgagctgtcatgctaggatatcttatgagtacgattgtcacgacgaatatagttaggtgttggtgttgagaagctacaccttgaggagttcaggatgacatgtatacgatgaggagaattgcgcgcaagacgcacattgtgggttgtcgtcacacgttgcattctgagtggttatgctcgtcgttctccatggctattgtccgtggggggctaagaaactcttatacaggtgtttgtgtcttttgtatgtagggagtgtctcttagggtagatgagtcatcgtgggggaatatcctgtcagacctcgggggattctcttttggagaatatgagcgtgctccccccccccacggtgatgcttcccacttttggtg

SEQ ID NO: 13301 - DNA, 546 bp, Glycine max
  misc_feature (60)..(60): n is a, c, g, or t
  misc_feature (85)..(85): n is a, c, g, or t
  misc_feature (110)..(110): n is a, c, g, or t
  misc_feature (195)..(195): n is a, c, g, or t
  misc_feature (215)..(215): n is a, c, g, or t
  misc_feature (270)..(270): n is a, c, g, or t
  misc_feature (311)..(311): n is a, c, g, or t
  misc_feature (318)..(318): n is a, c, g, or t
  misc_feature (343)..(343): n is a, c, g, or t
  misc_feature (394)..(394): n is a, c, g, or t
  misc_feature (450)..(450): n is a, c, g, or t
  misc_feature (457)..(457): n is a, c, g, or t
  misc_feature (463)..(463): n is a, c, g, or t
  misc_feature (470)..(470): n is a, c, g, or t
  misc_feature (472)..(472): n is a, c, g, or t
  misc_feature (488)..(488): n is a, c, g, or t
  Coding DNA Sequence Number=SeqID_3522
gcgtccgccatctaattgaacgagtactgagacgtactacttagacgtgcttgtacctangtagtgcagctagctgagactactngtcttggattgtgcgagcggacaancagcgtatatgcacaccatgatacgcgctgcgtgaatcacgccatgcatgtcgacgctcgagttgaatgagtgcgactgtattantcgagtagttgctgcgtganctgagcgcgctgctctcgcacgcgaacgcgctcgatggtgatacttgctcatttntatacatgatcagtcgacgtaactagatgagctacgacgantgcgatngcacgtatgagtgcgcagcgcgaancgtcatcgtgtgatgccgataatacgccagagacttgtgtacacacacagnaccgctcagctgtatgatctcagagacgactacgcgctacggcgacggcgaaccancacggcnagcacnatgtcgntnatcacgactagcggtngcggtgttcgctgctagcgcgtacgctcgacacgtcttgactatgacgctgatctaga

SEQ ID NO: 13302 - DNA, 499 bp, Glycine max
  misc_feature (182)..(182): n is a, c, g, or t
  misc_feature (184)..(184): n is a, c, g, or t
  misc_feature (245)..(245): n is a, c, g, or t
  misc_feature (304)..(304): n is a, c, g, or t
  misc_feature (322)..(322): n is a, c, g, or t
  misc_feature (328)..(328): n is a, c, g, or t
  misc_feature (346)..(346): n is a, c, g, or t
  misc_feature (378)..(378): n is a, c, g, or t
  misc_feature (445)..(445): n is a, c, g, or t
  Coding DNA Sequence Number=SeqID_3523
gagagagaggaatactacaatatatttgtccagcccacacagattcgtccttctcagcgtctgaatcacccacccgcctctcagcttctccttctgataatgatacaatcacacatcccacttactcatacaagagatagacacacacaagacacgcagcacacagaacccctccttctcgnantcgccctgcaccaccactcgtcccagcactacctacaccgcctcacaaagcacgaccggcnggcgcaggcggacacgagacaaagaactaaaccacaagacaatacataacaaacaatanaaccacacgtaatacatngcaaanatcgaccccgggcacgcnacacctcgctgtacttccgctcctccattctnctttagtgtctcaatactacaaacaccgccggggaccgctagagtgtgagcggagacgatcagtggngtctagagtagcaccacgagtcaagccacagtagacagtattcatcgcaccact

SEQ ID NO: 13303 - DNA, 544 bp, Glycine max
  misc_feature (40)..(40): n is a, c, g, or t
  misc_feature (118)..(118): n is a, c, g, or t
  misc_feature (133)..(133): n is a, c, g, or t
  misc_feature (223)..(223): n is a, c, g, or t
  misc_feature (225)..(225): n is a, c, g, or t
  misc_feature (234)..(234): n is a, c, g, or t
  misc_feature (236)..(236): n is a, c, g, or t
  misc_feature (246)..(246): n is a, c, g, or t
  misc_feature (249)..(249): n is a, c, g, or t
  misc_feature (251)..(252): n is a, c, g, or t
  misc_feature (254)..(255): n is a, c, g, or t
  misc_feature (261)..(261): n is a, c, g, or t
  misc_feature (263)..(264): n is a, c, g, or t
  misc_feature (295)..(295): n is a, c, g, or t
  misc_feature (301)..(301): n is a, c, g, or t
  misc_feature (303)..(304): n is a, c, g, or t
  misc_feature (310)..(310): n is a, c, g, or t
  misc_feature (313)..(313): n is a, c, g, or t
  misc_feature (362)..(362): n is a, c, g, or t
  misc_feature (398)..(398): n is a, c, g, or t
  misc_feature (402)..(403): n is a, c, g, or t
  misc_feature (434)..(434): n is a, c, g, or t
  misc_feature (437)..(437): n is a, c, g, or t
  misc_feature (501)..(501): n is a, c, g, or t
  misc_feature (507)..(507): n is a, c, g, or t
  misc_feature (514)..(514): n is a, c, g, or t
  Coding DNA Sequence Number=SeqID_3524
agctcagtctagctagacaatcccccgtggtgttgtgatntatgtgtgtggttgttgtcatcatgatgaaccttcactgtggtgcgagtatgtgttgttgtgcgtgcggctcggcatngttgtgcgccgagtnggggtggttaggggtgaggatgtgatgtgagtgatgtgtgtaacaccccacaccccacgccccctcccacctactactagtacacctttntntgtcctctntnttattcactnccncnncnntctccncnntttgagtgttgttatatcgatttaatttganagaagnannaaaaanccncactcctactgatgttatgtatgtgttttaatggtgtgatgagatatanaaacactactagtgagagagagacagcgccgccctncctnntcccctttcctttatgtttgtccattcggcnacnggcgcgcccgaccatcacatgcccacgtgcttttgttttgtattgatcaagaggagacgacgcnacgtcntctatcncacggccgcgacgcagcagttgtgattggt

SEQ ID NO: 13304 - DNA, 542 bp, Glycine max
  Coding DNA Sequence Number=SeqID_3525
ttcatcgacagtcacttcacaatccctactcggccagacgcaacagtcacttctcggagctggcgcgccaaaggatgccgtccctgctctcagtcctggaggtgcgggtgcgggagtcgtgcctcccggcaagggtctgcgtggcatgctcgacaacatcgtcacagacggcatgcgcgtcgcgtctgaggtccgcaggcgcatggacgaagcacagaaggagatcgacaagggcgccagcacacgtggcactgaagatgagtccgatgacgacgaagaagagggcgttggtgatctcctcgatggtgccgatgctcttgcgactagcagcgccaggaaagtgagcggtgctggggatcgaagtgaaagtttgctggattcaccagtgagtaagggaaaggagaaggagaaggagctgcctttgccgccgccaccgtcagcggatgaagcagtgagtaaggacacgatgtttgagcggtgaatgaacacgtcgactaggtatactaggcatcttgttagacgaccgtggacacttacgcagt

SEQ ID NO: 13305 - DNA, 543 bp, Glycine max
  Coding DNA Sequence Number=SeqID_3526
gtctaatcagcatgtgctcaatgaggttgagcggagtttgccccatgctttgtgtgttgttaggtgtttggttgccaagaggtttctcctccccggcggtggtgcccctgagattgagctctccaggcaggtgggtgcctgggttaaggtgttgccccggatggagggatactgtgtgagggcattccctggggcgcttgaagttattccctaccctctggctgaaaatggtggtttgaccccccttgccggtgttttttagctaaggaatcgtcaggcccagggtgagataaatgctggaataaatgtaaggaaggggcttattaccaacatcttggaggaaaatgtggtccagcccctgcttgtgagccccagtgcgatccccttggcgacaaagtgtgtgcggatgattttgaagatttatttttttgtaactgtaaggtagggttgattgaacaatttcgaatttggagagaaagtgaatcatcccatattttcttttttttttttttgtctttcgtgctttaattttaagatggaaga

SEQ ID NO: 13306 - DNA, 520 bp, Glycine max
  Coding DNA Sequence Number=SeqID_3527
gcccctggaatgagcaattacctaaaaaatgcccttggaatgggcaattacataaaaaatgttcctataggactcaacactcaaacatttaaaggggggtggggcattctatcaaacactttggaggtggaacaaaaaaaaaacctctccctcatggatctacaaaaaaaaatccccccaaccaaaaatcccttttcatcccttaaacaaatgccaaaaccaccaaacttgggttggaaaataaagaaaacaacatttaccttacattttaaaaaaaaagtagggggagggtgccaagcccctgaaaacacaggtcagcactacatacatacaccttaaaaactgggtccatcccaaaatttcccattacaccccatccaagggtggtacttccagcacttcctaaggtggttcctacactcttttcagaaaaatttttgaccctccaaaatgggcattccataaaccaaaaagggagtggcttcccaaaaggaaattaattacatttcggaatggccat

SEQ ID NO: 13307 - DNA, 532 bp, Glycine max
  misc_feature (275)..(275): n is a, c, g, or t
  misc_feature (414)..(414): n is a, c, g, or t
  misc_feature (461)..(461): n is a, c, g, or t
  misc_feature (502)..(502): n is a, c, g, or t
  Coding DNA Sequence Number=SeqID_3528
atctacagtgagagcgacgatcgcaacagagacgcccagcgccactctctctattacatctattatatggtagtatcgctacactcctgtgaggatggtttgtacattaccgcctgcctaatcgtgtcgcccacacgcctgtgtgtcttattctgattgattacctgaatgaatctctcgcttactacgattatgcatacgatcgtcctgctctgcctcgctacactagtgatatatatagatcggtgcgtcctcgtactacgacctatgcgctntattatgtgagctacgctctctcccgtcctgcgtatctatgctctatctgttatagctcgttctctgagctctattcatatcattatcccagcgtgtcgtgttgtcacagcgatcgagcacgagtatcggtacactagnagctgatatgagttctgcagctacgtagtcgctcgcaagaagacacncatgtagtcgtactcatcaccactcatcatgtcatggttcncaacgtcgagacactctgcacgtcatgatt

SEQ ID NO: 13308 - DNA, 433 bp, Glycine max
  Coding DNA Sequence Number=SeqID_3529
cttgctgatgaagtcgaaaaactccaaaccaaacttagaattattgaagatgatcatgctagagctgctgaatcattaaagtctgatttcaatgttagactctcagaattagaacgtgagaaccaaaagactagatccaagtttgaaaatagagaaagagaacatgaggctgaaatcaagagtctcaagtctcaatctgaagaattagcgagaatattggaatcagttactgccgaaagagaagaatatctcagaaagtacggagaattatctcttcaagaacaaggcttcaagtccagagaagttattcttcaagaattacaaggaacagttgaaagactccagaaagaggctgatagataccagactgagcttgccgatacagaaagaagatatagagctcaagttgatgatcttcgttctgaatccaata

SEQ ID NO: 13309 - DNA, 581 bp, Glycine max
  misc_feature (110)..(110): n is a, c, g, or t
  misc_feature (146)..(146): n is a, c, g, or t
  misc_feature (268)..(268): n is a, c, g, or t
  misc_feature (356)..(356): n is a, c, g, or t
  misc_feature (364)..(364): n is a, c, g, or t
  misc_feature (416)..(416): n is a, c, g, or t
  misc_feature (478)..(478): n is a, c, g, or t
  Coding DNA Sequence Number=SeqID_3530
tagctcagagtaagcgtgccacggacggagctaatgattcaagaaccgccacgcgtggccggcgcctatgccactccctacaccatctcccagtccaccgaatgcgtccnctatacgtcgccactatctactacacccacatcacncatccaccacgcgatacgctggtcgttacctacgtgctacactgcgagagcgtcgcagtgccgccctccacttctcctaccaccaacgagtgtcacgcatagatagtgactgccggaaattnaacgtgcggtctgtcattcttgacgcggtcgacacactacatatgcagtacgacgaagacactgtcgatagtctacaggaagtctganaggcatantggtagactcatgacgaggcacctgcgcaccgagtctaagggtgcctgtgangtatatgtcgcacactcgacacagcactccacatcaacacacccggactccgcgacccaatnaccgtatctgtattaccaagaagtatcgacacgccacaacgcagatacctctagagacagaggccctcacgtctgaatagacgtaagatcgtgagtctcctgc

SEQ ID NO: 13310 - DNA, 469 bp, Glycine max
  misc_feature (422)..(422): n is a, c, g, or t
  misc_feature (439)..(439): n is a, c, g, or t
  Coding DNA Sequence Number=SeqID_3531
ttttgtgccgaacgcgtgttcgcagcagcagagttacacgaaacacacgacaccagcacaaggggactgcgcggcgacaccatccctccctccctccctctctacaccaatggaaggctcgccggcgacgtgtctccccgaggccgacgcgctccccgatggcttcgtcgagagctcctccgccgaccaggcccagccagtctcctccgcccccgcctccgccgccggcgatcccctgcatcccgccctcggccctgatcacgagggcgccgcccgcgccgacggcgaggaaaccctaggcgctccatacacccccgccgacgccgccgatgccctgcggagcctctccatggccgccgccgcttcggagccggagcgtgcccccgagcagcaggggcccgccgcagacataggaggtgccnaagatgcaatgaagganagctttgtggtagagcaatcggaaccgctg

SEQ ID NO: 13311 - DNA, 194 bp, Glycine max
  Coding DNA Sequence Number=SeqID_3532
ggaaatggctgattcttaactagatctactacatcaaaagcattataaatatgttaccactcataaattttcatactgggctcgaagcttcttgcaagatttgtaaaggacttgtagtgatcatgtgcgacgaaggtcgtgggggattggtttttgattaagctttagaattgttgcactttatccaaacttca

SEQ ID NO: 13312 - DNA, 552 bp, Glycine max
  misc_feature (27)..(27): n is a, c, g, or t
  misc_feature (59)..(59): n is a, c, g, or t
  misc_feature (62)..(62): n is a, c, g, or t
  misc_feature (67)..(67): n is a, c, g, or t
  misc_feature (73)..(74): n is a, c, g, or t
  misc_feature (81)..(81): n is a, c, g, or t
  misc_feature (101)..(103): n is a, c, g, or t
  misc_feature (119)..(119): n is a, c, g, or t
  misc_feature (132)..(132): n is a, c, g, or t
  misc_feature (138)..(138): n is a, c, g, or t
  misc_feature (149)..(149): n is a, c, g, or t
  misc_feature (177)..(177): n is a, c, g, or t
  misc_feature (238)..(238): n is a, c, g, or t
  misc_feature (273)..(273): n is a, c, g, or t
  misc_feature (294)..(294): n is a, c, g, or t
  misc_feature (434)..(434): n is a, c, g, or t
  misc_feature (441)..(441): n is a, c, g, or t
  misc_feature (499)..(499): n is a, c, g, or t
  Coding DNA Sequence Number=SeqID_3533
actctaacatactcacacgcaacgcgncacccgcacgcctacccactcatctatctcancanacaancacaannccgacanccacgccacactacgacctnnnccactcaagcacactnctatacacaacanagacanacagagcacancctgacacagtcgcacgcacgccacgtncgccgcacgacgtccactactcgcacacaccagacactctccacactctctctccacgcgncacatctcacacacacacacacaccacacacacancccgcgcatcacaccatcatntcccacatctcctcatcacactcacctcacacccacaccgcaccctcgcaacaccacgcaccgactaaccgtctctcctaccacaatctacactctcactccacgactcgcctcgtgtctcacgctcccacaccacactnccctccncacctcctacacagacccgaaccgacgccacggcgaccgcgcgacactcagcgacagncacgatcacgtacctctcgcatacgcacacatcaccacgcaccacgtcgtcat

SEQ ID NO: 13313 - DNA, 538 bp, Glycine max
  misc_feature (36)..(36): n is a, c, g, or t
  misc_feature (63)..(63): n is a, c, g, or t
  misc_feature (90)..(90): n is a, c, g, or t
  misc_feature (106)..(106): n is a, c, g, or t
  misc_feature (137)..(137): n is a, c, g, or t
  misc_feature (148)..(148): n is a, c, g, or t
  misc_feature (176)..(176): n is a, c, g, or t
  misc_feature (189)..(189): n is a, c, g, or t
  misc_feature (192)..(192): n is a, c, g, or t
  misc_feature (220)..(220): n is a, c, g, or t
  misc_feature (227)..(227): n is a, c, g, or t
  misc_feature (231)..(231): n is a, c, g, or t
  misc_feature (236)..(236): n is a, c, g, or t
  misc_feature (271)..(271): n is a, c, g, or t
  misc_feature (278)..(278): n is a, c, g, or t
  misc_feature (321)..(321): n is a, c, g, or t
  misc_feature (330)..(330): n is a, c, g, or t
  misc_feature (341)..(342): n is a, c, g, or t
  misc_feature (353)..(353): n is a, c, g, or t
  misc_feature (357)..(357): n is a, c, g, or t
  misc_feature (370)..(370): n is a, c, g, or t
  misc_feature (372)..(375): n is a, c, g, or t
  misc_feature (377)..(378): n is a, c, g, or t
  misc_feature (387)..(387): n is a, c, g, or t
  misc_feature (428)..(428): n is a, c, g, or t
  misc_feature (432)..(433): n is a, c, g, or t
  misc_feature (436)..(437): n is a, c, g, or t
  misc_feature (439)..(439): n is a, c, g, or t
  misc_feature (443)..(443): n is a, c, g, or t
  misc_feature (453)..(453): n is a, c, g, or t
  misc_feature (458)..(458): n is a, c, g, or t
  misc_feature (469)..(469): n is a, c, g, or t
  misc_feature (473)..(473): n is a, c, g, or t
  misc_feature (498)..(499): n is a, c, g, or t
  misc_feature (513)..(513): n is a, c, g, or t
  Coding DNA Sequence Number=SeqID_3534
atggcgatgatgatgagtgcagtctagtagtagatngtggtagtcgtgtgctgtatattggtntcgctttcgtagttcgatagtgtcagntacctcatacgtacgngtatgaactaagacttggacgtataagtccncatcattatgnatcgcatatgtctcatagatgtactganagcgatcgtcccngcncgaggcgcgcatactcctctcgtcgtanctctatngcgntgtcngtgcaatggaggtgtccatcagtgtgttcgagcgnctattanttaactatgatgatgcgtatgtgagtgcttgcctagttgactngctagtcgngtgtgtagtgnnatgtctatttntggngctaatatgtgantnnnnannctctcaatnttctacatcttctatctcgctctcgttcgaggctgagcatnagannagnnantgantaaatcacanagagnaggtcgtagcngggncgcgagcgggggcgggggcgagagnngcgagagagtagtngtatgaagtactatatggcggtgta

SEQ ID NO: 13314 - DNA, 466 bp, Glycine max
  misc_feature (188)..(188): n is a, c, g, or t
  misc_feature (346)..(346): n is a, c, g, or t
  misc_feature (376)..(376): n is a, c, g, or t
  Coding DNA Sequence Number=SeqID_3535
gtgtggtacgtaatgtcgtgatgtctgtgtgtgtgggtgtgttgggtttcgtgtgtgtgtatggcgtagtgttacggtggtgtgtacgcgctagagaggcgcgaggcgagcgcaccagacggagagaacaacgacgtcacacaacgagccgcggcagagagcgggccctcaacccacagctcacacancgccccgccaccacagagacataagaaacaaacgcataactcgaccttataaacctgcgttgtaatccgtctaacaaccacctatgataatattatcctttagtcacaatacgaagcgagacgtagagacgagtgagagaatagttgggtgtcgttcngatcaggtcgccgcctcagcagtagtgganaatgatgttcttcggccggtcggaatggtgtgtggggtggttgccagctcaaagttataaaaggtatttctctctcctctatcaataata

SEQ ID NO: 13315 - DNA, 527 bp, Glycine max
  Coding DNA Sequence Number=SeqID_3536
gtcttttcggcaacagcactggtatgacatcaaaccacacacacgagtccgtcactacaaacaacaaccaacatctcggcgcgacctcagccagagctgacaaccacaacaacacgcacctcggagccacatcagcacgagacgaggagacactttctgcaggatcaacagcccgagctgagtccaacgcttacaggatgagtgccaacaacggagaccttgagaaggacttctctaacaggaacggacccaacggatatgggtatggtggcgcaaacaatcaccagcacctccacgagggcatggatgaggatctggccttgaagcacatccggaccgccggtagcatctccatctctcctgagctgttcgagaagctttacctttcgccaaagaacgaggtcaagggtgaacttcgtaagactttcggtaaccccactcctcttgctcttattggtttcctgttggctctcaccccgcttagttggaccttgatgggatggcgcggacctggaggctagttaata

SEQ ID NO: 13316 - DNA, 316 bp, Glycine max
  Coding DNA Sequence Number=SeqID_3537
catatcccaatataaaagcgactctaaccccagacaggctggcggggccaataaaactgccaaccataattctcaagttaaccactccgattttattttctccaagcatatttattactctccctgctacacttatatgcggtatggttcgatttgatacgaatcctggcggtactcctgaattgctaggaaattttatgattgctgcttttattgcttctcttttatccttgaccttggtgtaccttctttaatatgtccatctttcaggtgcaaaaatggcaatcatactacctacttctctgctatctatttt

SEQ ID NO: 13317 - DNA, 295 bp, Glycine max
  Coding DNA Sequence Number=SeqID_3538
ctctaaaacggcgacagcttccatactcagtcctctccctcaggcagctcttctcttcgagatcgcacaatgtctctggttgcaaacgacgagttccagcacattctacgtgtgctcaatactaatgtggatgggaagcagaagatcatgtttgcccttacctccatcaagggtattggcaggcgtttggccaacatcgtctgcaagaaggccgatgtcgacatgaacaagagggctggtgagttatctgcagctgagatcgacaacctcatgaccattgttgccaacccaaaac

SEQ ID NO: 13318 - DNA, 533 bp, Glycine max
  misc_feature (51)..(51): n is a, c, g, or t
  misc_feature (119)..(119): n is a, c, g, or t
  misc_feature (132)..(132): n is a, c, g, or t
  misc_feature (234)..(234): n is a, c, g, or t
  misc_feature (346)..(346): n is a, c, g, or t
  misc_feature (372)..(372): n is a, c, g, or t
  misc_feature (392)..(392): n is a, c, g, or t
  misc_feature (402)..(403): n is a, c, g, or t
  misc_feature (405)..(407): n is a, c, g, or t
  misc_feature (450)..(450): n is a, c, g, or t
  misc_feature (476)..(476): n is a, c, g, or t
  Coding DNA Sequence Number=SeqID_3539
tacatcgagggcagcgcgcagacgatgtgagcacatactatagacaagagnagacagtacatacaagcagaactaccagagccaacaaacacacacagccccaacaaccacacacacancgcacacgacaancaataccgaactaaacagcatctcgcaccactccacccggcccccgcgccccctcgctcagcacgacaacgacagatagacgcgtctaaggcgcacgcgcgntggtaccgatccgactgcagcacatgaacaagaccgacacacaccagacatcacaaccacacagaggaacagtgctagcacgacacacgcggcagcaaacagaacacacagncttattacatactagacatgccatangcatcatgtcgtgttagtgnttacattttnntnnnttgtgtgtgtggatgagtttgtcgcgggccaggtctgcgagtngtgtatagtcgtgagtggtgagatgngatgagagtgactgatgaggtggtcaatgtaggacgagagtgagtacgtctcgtaga

SEQ ID NO: 13319 - DNA, 540 bp, Glycine max
  misc_feature (212)..(212): n is a, c, g, or t
  misc_feature (214)..(214): n is a, c, g, or t
  misc_feature (224)..(224): n is a, c, g, or t
  misc_feature (334)..(334): n is a, c, g, or t
  misc_feature (408)..(408): n is a, c, g, or t
  misc_feature (443)..(443): n is a, c, g, or t
  misc_feature (458)..(458): n is a, c, g, or t
  misc_feature (465)..(465): n is a, c, g, or t
  misc_feature (489)..(489): n is a, c, g, or t
  Coding DNA Sequence Number=SeqID_3540
tctacgtgacgtacaagcgcgaggtgtgcgcctcactgattgtgtagctcaggctgcttactggtcgtgctgggtgacgcgaccgtagtgcatgacgtcacgatatatgagactaagactcgtctgattgtgacgacagctacgagcgtctgtaatatctgtgagatattatgtaactgtgggagtgcagtgacgtggatcgcgacgctggnangaagcagccncgtgactaatatgatacattcgaatgcgagatcgcgctgagcttccggatcaatgctcatgactcatgactggtgagcgcacgagcggaacgcgtatatctcgatcctgnggcagccgtcgctcctggtgactgaatagctacatcgtgctgtattcgctgtgttgagcgacggccaacacatntcggatgtgtagtaccgtctacatgtacgcctagnactcacactaacagncgagatngcacaggtgacgagtatcgcctgnacacgtgacgccagtatcagacgacgcggtgctacacgaacgaactctctg

SEQ ID NO: 13320 - DNA, 566 bp, Glycine max
  misc_feature (95)..(96): n is a, c, g, or t
  misc_feature (98)..(99): n is a, c, g, or t
  misc_feature (101)..(101): n is a, c, g, or t
  misc_feature (103)..(103): n is a, c, g, or t
  misc_feature (105)..(107): n is a, c, g, or t
  misc_feature (109)..(124): n is a, c, g, or t
  misc_feature (132)..(132): n is a, c, g, or t
  misc_feature (140)..(140): n is a, c, g, or t
  misc_feature (150)..(154): n is a, c, g, or t
  misc_feature (156)..(156): n is a, c, g, or t
  misc_feature (160)..(166): n is a, c, g, or t
  misc_feature (168)..(168): n is a, c, g, or t
  misc_feature (171)..(177): n is a, c, g, or t
  misc_feature (187)..(187): n is a, c, g, or t
  misc_feature (214)..(214): n is a, c, g, or t
  misc_feature (372)..(372): n is a, c, g, or t
  misc_feature (487)..(487): n is a, c, g, or t
  misc_feature (510)..(510): n is a, c, g, or t
  misc_feature (517)..(517): n is a, c, g, or t
  Coding DNA Sequence Number=SeqID_3541
gcggctttcagctcgaggctacttgcggggttgcgttgggagatccgattagagggaggaggtgcggtcgtatcttccgaggggagaagggatanncnncncncnnncnnnnnnnnnnnnnnnntttcaccnttcggggnctagggggtnnnnntntatnnnnnnncncannnnnnnctcctcgcancctcccgcccctattctacctgagccntttagcgttgcatcggcataagatcgcgtcatagtctgagcgcgcaccggaaggcaactgtccgttttatcagaacatcggcgcgcacaggttcgactcaggcgagcgtgtcacgacaggggaggaggacattggatgtgtatacacccaacaggaantgtcatatcgcgtactccggtagagtggtgcaccgcggcgggcgacggagcagctgcgcctcttatgagagctagcgacacgcatcgcctacggctcgtagagagacgatagacntgagcgtagttagtgggagacangaggagntaacttacatatacgagcgactttgtcgtttgcctgagaacatgctcat

SEQ ID NO: 13321 - DNA, 279 bp, Glycine max
  Coding DNA Sequence Number=SeqID_3542
tgccatttcagttcgaacatctgtagaaggcctgaaaattgaagcaaagattacaaataaaagtatggtgtctattatttcttgagatctactgattggactctttgttatgcaacaccgaggctcctacaaggttgcattcgtgaatgcccccataatcatcctatggttactgactattaccatgattggtataaacaatgtcatcaagtggtatacaagagtatatcaggccgtgactccatataatatatacaagttatccaagcttacaggaaa

SEQ ID NO: 13322 - DNA, 409 bp, Glycine max
  misc_feature (78)..(78): n is a, c, g, or t
  misc_feature (91)..(91): n is a, c, g, or t
  misc_feature (99)..(99): n is a, c, g, or t
  misc_feature (272)..(272): n is a, c, g, or t
  misc_feature (287)..(288): n is a, c, g, or t
  misc_feature (291)..(291): n is a, c, g, or t
  misc_feature (383)..(383): n is a, c, g, or t
  Coding DNA Sequence Number=SeqID_3543
tggacgccgcgagatcacgtcggacatgaatcgcgcatagatactctgaagttccgcttgaccatcacatcaaaatancttaacacgactntagacgancaatctactcgttcgtgtgtatataccgtccacccataacacgttacgccacatcctcgtgtagtaatcatatcggccttcgctctctacttctactctccctcacgtaccgttgccgtctttcacctacaccatacctgcttgaggtgatacactagcgaggtctcgtgtantgtgctctctctctnngtnccaaaatcaatgcgtgacggtgcacactggacgtacgtcgcagagcgagccgacaacggagagatatcttcgctctcgattcttttcttccntgtatggtccatcaacgcaatacctc

SEQ ID NO: 13323 - DNA, 533 bp, Glycine max
  Coding DNA Sequence Number=SeqID_3544
agacgggcgcgcatgagagtacataatacagacacgagaatgaggtggtgacggctgttatactcggcgctatatagtatatctccaggctctattccggtagcgccgtacggatgaataaataggtgatcaaaccgcgtgcgggcgcgggctgcgtggaggcgatagataaaatgatcagcatgtatccgttacatctatgctataacctagtatattattaatgaatactttaataagcctatacgtcgtcgtacggtacgggagttatgcggtgaataatgcactcagtctctcaccaacaatatttattctcgtatcagagagcatgtgtcgtgggctcgagggatataagactacataaagtgcgctcgcgcgccgcgatatgcacgttgctctctaaaacacctgacaacaaatgcgttagatagtggggagcctcgcatccgggagtctaaccatctgcggggcggaggatggtaaataaaatcgtagatggagagatgacggaacgacaaaagacggcctggaat

SEQ ID NO: 13324 - DNA, 472 bp, Glycine max
  Coding DNA Sequence Number=SeqID_3545
gtcacccgcgtcgtagaaacactatttgcactcgtgatgttacatgcttcatgcaagatgcattgtggaaacaaggggcaactgaaaggttcccatttagaatgccctaggggggactttgacagggtctgtgcaaccacttgtgctgcacagttcagggcggagtactagatcgaagcattccaaaatgccaatgcttgcctgaggctgagggctgcctgcgacaagctgaagaatgtgcttagtgctactccggaggccccttcaaacattgagtgcttaatggatgataaagatgccaaatgctttatcaagcgtgatgagttggagcaactaaatctttcaattctggaacgggtgaagggacctttggagaaagcacttgcagaggcaggtcttacagtcaaacatgagcacatggtttgaaggggctggatctggatctcgtgtaccacacttcttcatcatattg

SEQ ID NO: 13325 - DNA, 547 bp, Glycine max
  misc_feature (169)..(169): n is a, c, g, or t
  misc_feature (238)..(238): n is a, c, g, or t
  misc_feature (241)..(241): n is a, c, g, or t
  misc_feature (262)..(262): n is a, c, g, or t
  misc_feature (346)..(346): n is a, c, g, or t
  misc_feature (391)..(391): n is a, c, g, or t
  misc_feature (433)..(433): n is a, c, g, or t
  misc_feature (438)..(438): n is a, c, g, or t
  misc_feature (494)..(494): n is a, c, g, or t
  misc_feature (496)..(496): n is a, c, g, or t
  Coding DNA Sequence Number=SeqID_3546
gtactgctatacgtctactcacgatggtatgccgtgcgcatgagcctgactgcatgcatgtgtctgctgaattcgcacccacccgccaagcttcgcgcgctgagtcagtggcagtatggtgcaacgtctagtataattgttgatcgattatgcacgacctcctgtctgngtttcagcgctcgcttatgacagaggctcaccatctgtggtatgtgatacaactaacgctcccgtcacnctntaactactagtatattcaaantatacacactatgtcatcggtctatactcatctctctccactagcgagatacgcgtagtcgtatcgctgatctatatcctgcantgtgatacgtcatcgcactcatattacatctgcgtatcagctcgnactatcatgtggcgcgcgctgttctactgatctgtctatgtncctantaagctgcacacctcgccgcttacatgtagctctcgagtcattgccactcgctcgngntactattacctttctacgtgtctcatcagcatgactattcacatctcgtga

SEQ ID NO: 13326 - DNA, 593 bp, Glycine max
  misc_feature (211)..(211): n is a, c, g, or t
  misc_feature (307)..(307): n is a, c, g, or t
  misc_feature (315)..(315): n is a, c, g, or t
  misc_feature (370)..(370): n is a, c, g, or t
  misc_feature (401)..(401): n is a, c, g, or t
  misc_feature (535)..(535): n is a, c, g, or t
  misc_feature (566)..(566): n is a, c, g, or t
  Coding DNA Sequence Number=SeqID_3547
aaattataagtcttcgcgggtgcgtttataagtgagtcgaacccataatcatatacagaacgactactcctcacggactagctccatgtaggagcatagcgcgatcaaccatgaatacgtatacgtatatttgaacacatctagcggaagagatgagcgactctcacgacagcacatctcactatgaaaactatcgacgtgtatgcgagcntgaggtgaactttatgacggagactatctgctactgtatataccaacatagaggacgctgagaactcaatgagagcagatgacatcatcgagccgnggcagcgnagccgccgaggcgcgcgaccgcgctgccacagctagaacacacgcgaggcaccgnacatactgcagtcactgacatcgactgaggnactctgagtgcgtgacatctcctactactcgagatgtgtatgtgaatatgaagatgtcgcggttagtgaagtgagaggaaggctgcgaggcggagcaggatcgtgaacgacgtatctgagaataggaatcgtgngtacatatataattacacacgacacactcanatgctccacgctgtgcatgtgctcata

SEQ ID NO: 13327 - DNA, 392 bp, Glycine max
  Coding DNA Sequence Number=SeqID_3548
ctcttgtatttcttgtttagttgcaacctctttatcatgacaatttccttcataaactcttcgatatttgagtttctgccatggcagctgttgaagctgagtgcttgcacctggatcttgtttattaccttttcttggctcagctccgtttcaaaggaaggactgaaagaagcaaaaactatggaagatttccaatcaacattagctactttagaaaaagaagcgaaatataaagatatcgcagtgcacgtaattatcggtttattttcggtttgtgctttgagccagtatgcattgtttatcacagtcaaacggcaatacactctccaatggatcgcgtatagtgtgctcctatttatcattcaaatggttttctttgatgcactctggga

SEQ ID NO: 13328 - DNA, 579 bp, Glycine max
  misc_feature (48)..(48): n is a, c, g, or t
  misc_feature (80)..(80): n is a, c, g, or t
  misc_feature (82)..(82): n is a, c, g, or t
  misc_feature (85)..(85): n is a, c, g, or t
  misc_feature (132)..(132): n is a, c, g, or t
  misc_feature (205)..(205): n is a, c, g, or t
  misc_feature (226)..(228): n is a, c, g, or t
  misc_feature (301)..(301): n is a, c, g, or t
  misc_feature (312)..(312): n is a, c, g, or t
  misc_feature (336)..(336): n is a, c, g, or t
  misc_feature (391)..(391): n is a, c, g, or t
  misc_feature (396)..(396): n is a, c, g, or t
  misc_feature (399)..(400): n is a, c, g, or t
  misc_feature (407)..(407): n is a, c, g, or t
  misc_feature (413)..(413): n is a, c, g, or t
  misc_feature (415)..(415): n is a, c, g, or t
  misc_feature (454)..(454): n is a, c, g, or t
  misc_feature (459)..(462): n is a, c, g, or t
  misc_feature (464)..(465): n is a, c, g, or t
  misc_feature (469)..(469): n is a, c, g, or t
  misc_feature (484)..(484): n is a, c, g, or t
  misc_feature (488)..(488): n is a, c, g, or t
  misc_feature (510)..(510): n is a, c, g, or t
  misc_feature (545)..(545): n is a, c, g, or t
  Coding DNA Sequence Number=SeqID_3549
gatgattacgctatatacacaccgtagcgcagtagatcgcactgtgantatatgtgcgctatccttgctttatatagcananacnagcgtacaagttgcgtgcgcgactcccacaccgagatgatgcgaccngccacacaatgtatatagagagctgtgtcatacgtcgaatcatgagcgatcacgctgcgagtgatgaggtctncgtatgccgcatcgtcagacnnntaacctacgtcgaacctacgacacactaccatgcacgacgctacacacgtcacgactctgcatcgatgagtangagatgcttcntgcactagatccgagctgcatganagctgagcactgcactaggtgccatagcatcagtgtcagtagagtacggatgtgntgctntcnntagggtnatagantntgacgatccgcggcactactcttcactaccgtcgcatgntctcnnnntnnctcntcattccctcgtgcntccnctactctgtacacggatgacgnagtagcgcgagaacttcgacgtggacttcatcaangctactgtaattacgtcgcaacccagaaagatca

SEQ ID NO: 13329 - DNA, 357 bp, Glycine max
  misc_feature (298)..(298): n is a, c, g, or t
  Coding DNA Sequence Number=SeqID_3550
ttgtttcatattactcgtcttccgccgccgccaaaacagccctacgcatggtgccccccgccccccccgcggccccccccggccgccgcctccctgctgggttccgtcgccgcccggcgccggccgcctcccccggcgcccgtccgcgacttccccctcgtggttcaccgtcaccacgatgtagagccgtggtgcttctcgtcccctcctttgctgcatagcggtgatctgctgttgtggtctggtagattagtgttactgataatcgcctcgtcgaagctggtgtttcgtcagtggntgcgcttggttatggtcgcgtacatctatagttcttgtacggatcacgcgctcgcgcga

SEQ ID NO: 13330 - DNA, 574 bp, Glycine max
  misc_feature (337)..(337): n is a, c, g, or t
  Coding DNA Sequence Number=SeqID_3551
acagaatccgacatcatcttaccgtcgcgctgctgttagcgcgggtaatgtgtgtgttcatgatatgggtgtggtggtggattgtttttaattacatccttctgacataagtcaaggctaattatgcgttcgggctgtttcgcgtcgccgtctatgctctacgttatagtactctgtgttctttgcttattgtatctttgctcattgctcttatttcgttattgcacttttgctttctccttatcattatcgttttagcgacgcgccataacccgtatccgattcgtccacgtgcggagagatatacagttcaccattcatcagtatatatgttganactaaattggacatattatctttataccacgtaactgcatatgtagaagagtataagtggttcatacaattactacttctcacccacacgttcgttatgtgacgttacttcttggatacttatattctataccctcttctcccgcgctgcggacgtttcgtctgcgtgtggtgcgggttatggcgcgagcgtaggtggagcatatcagtattcatcacacgtgtctcttagtcatat

SEQ ID NO: 13331 - DNA, 571 bp, Glycine max
  misc_feature (171)..(171): n is a, c, g, or t
  misc_feature (394)..(394): n is a, c, g, or t
  misc_feature (498)..(498): n is a, c, g, or t
  misc_feature (526)..(526): n is a, c, g, or t
  misc_feature (530)..(530): n is a, c, g, or t
  Coding DNA Sequence Number=SeqID_3552
accaccacccatctgaggttgtgagagatgggagagtgtgatgtggtgaagatttgtagcgtttattagcagccgtgatatctcacgatatactatatacgtagaagattgattaggcggctgagtgcactggctacatattctacctaaccgagacacgatcggatatgntcgtcacgcacgagtggctacgtgcgcggagcatgcacgtcgtcatcgctacgctacgacacagctacactatgcgatgtgctgtattgtagctattgtctgtctatgggtgctgaggagtgatatagtatgttacgtatgctacagcgcgtaacacatgcgcgcaatagcgactgtaacagttaatcgctgtgctgctcatgtttactgtggatcggtgcgnaggatgtgtgtcacgtgagatcttcgcacatccactcgtatatctctgtcatgctagtgtgggatgtgatcgatcgacgagcagggacccgatatgctgtgtcntgctgtgctcttttcggttcctcagccncgcngcgcacatgacctagggtgtataacacttctgaccgtcttc

SEQ ID NO: 13332 - DNA, 560 bp, Glycine max
  misc_feature (77)..(77): n is a, c, g, or t
  Coding DNA Sequence Number=SeqID_3553
ctcgtcgcgcgtgctggccgtatgtctgcatcttgacttatagtctggtcgcttgggtgtcaggtccgtgcgtacgntataggcgtggggtggaggcatgtgaatgtgttacacaccagcgcgtgcgggactgcgcgctcggggactgttgttgcccgcgcgggtgcggcctgcgcgtgtggcgtcgcggtgctgcgtgctgtctcatgttgctttcgctccggctgcgcgtgctgtctcggcgcgtcgcgcgcccgcttcacctgcgttgctgctactgcgcgtctagcctcgtatgcttcggcgcctgcttcactcgtattgcgagacagtgatgtggccgcgtgcgcgcgtgcacgcgatcagcactctactccgcttcatgatcgcctacgcctactcgtccgtgttcagctcgcacgatcacgaggtagtgtgttacggtggactgcttcgttggtcatgcgcgccctccgccgcgcctcctctcgctgcgacgcctcttcgttgcagatgcctacgcctctccgcgttgctccctgtgcgtgtcgtgtgcgagt

SEQ ID NO: 13333 - DNA, 325 bp, Glycine max
  misc_feature (81)..(81): n is a, c, g, or t
  Coding DNA Sequence Number=SeqID_3554
gtttatctctcgtccaaagaaacaaaccctaactctgtcatggaagactgggaagtggtgatcgagagctctggaactacncaggaggaggaggaggaggagaatccgaagagcttggaggagattgaagatggcacgcaaggtatggttaccttcgattacttctctatcgagaactcaaactcaaactcaaactcaaactgtgtgggtcgcgttgatgcgattgatgaagatgggtctgtccaatcgggtagtccaggctggatcgaacctacctccgacgctccttatggtcctaagctttttagcgagttgtggtcggact

SEQ ID NO: 13334 - DNA, 550 bp, Glycine max
  Coding DNA Sequence Number=SeqID_3555
gtagcaactcgcagcatgcctataggactcggcacgctggctctcacgctgagcgtggttcaagcacaagacgagtgtaatgtagttcgctgcctccaggatatcttgggtggcggagtccctacattaggcgccgcagatatgcagcctcatgctgttctggccttatctagctcgcggctgattcatacattaggcttcacgaaagtacaagtcgcgggccgtaagggcatccgcgtaaagcaaggctacacaggtggtatgcggaagggtaagtctcttcgtcgatgcacctggtcctgtgccgcggaagaaaaagccatctcacgtaacgcctcttgcgatatttgtgcgacggtgtggttcttgctctagcagccatcgaaataatcacgcataaaggactttctaggtgcatgatgctcgatcaagacaagggtcgctctacctcagagaggcggttatgcgaaagaaatcgagctctgtactgtcaccccgcaaagataaaggtgcggccgcggggggagcgtttgttattcgagcctccata

SEQ ID NO: 13335 - DNA, 571 bp, Glycine max
  Coding DNA Sequence Number=SeqID_3556
gaactcaaggcgatcgcttcacgaggatcgtgtcattcgttctaatctaatagtgagttttgattgacgtagcgcgcatgaggtataattaatatgtcttttctgtagaatctgtgatggttggcgttgcccaggatgatactcacgtgagatcacgtaatcggcaagagacattccaatcggaacagtatatctccggtagtcaaaagctattcgtttcttcctggctattgatggtcctgtgttcgctctagccttaatgcctgatcattgccatacttgccgttcctgttgagagctgtggacggctgcgctgttaatctacccttaagctcgagagaaccgcggcgccctgccagccgatggcgttggcttgatcagaggcctggagttagtcgtagttatgagatcgttctctggtagacgaggtgttcgctggcgtctcgctctagagtgttgtctcctaggggtgcttctcttctccacacccgggagggctcccactttctttaagagtgtcggctctcccctctgggggtgatgtcttcgcatctgttgtggtgtgtcgtac

SEQ ID NO: 13336 - DNA, 299 bp, Glycine max
  Coding DNA Sequence Number=SeqID_3557
cctccaccgggtacagaacgctgaatgcgggcctgcccttcctccaaatgggggggggcattgcccccccagggggggtggggggggaatcccgaagcctggttggaaaaggcaaaaaaaacccccggaccggcgaaaaattggggggtggcctcaaaaaagggccccaaacgggcgcaaagggaggggggaactaaatttaccccggccccccccgcttttccaaaaaaggggggggggccccccggccaaaaaaaaaccccccccacgggtttacgcgcacccgattaatttaaggg

SEQ ID NO: 13337 - DNA, 571 bp, Glycine max
  Coding DNA Sequence Number=SeqID_3558
gaatacgccacaccgtttggtttgacgtcagaatatgctcatcccgctgagattctcttcctgggttttgcgacctttattggtccggctctcacagggcctcacctaatcaccctttggttgtggctggtgcttagagtcattgagacagttgaagcacattgtggttatcatttcccatggagtccatctaattttcttcctctctatggcggtgctgacttccatgactaccatcaccgtttactctacacaaagtctgggaactactcatcaacttttgtctacatggattggatatttggtaccgacaagggttacagaaaactgaaggccctaaaagaaacctgacaacatgttaaacttggtatatcaagagagaaaggtttcactctccaaaactctccttttgttttgcggtctcgtgaatatttaaaactttagtcataagagcatcataatagcatgctatttggtctgaatctttcttactgtttgtcttaatctttggttagagctactgctcctagttacatttagtccataagattcattctcatgtatgcgcctc

SEQ ID NO: 13338 - DNA, 592 bp, Glycine max
  misc_feature (188)..(188): n is a, c, g, or t
  misc_feature (412)..(412): n is a, c, g, or t
  misc_feature (456)..(456): n is a, c, g, or t
  misc_feature (510)..(510): n is a, c, g, or t
  misc_feature (516)..(516): n is a, c, g, or t
  misc_feature (518)..(518): n is a, c, g, or t
  misc_feature (530)..(530): n is a, c, g, or t
  Coding DNA Sequence Number=SeqID_3559
tgctaccaggaccatctgactgaggagatcacagcacgtagtacgcgcgaccgacggcgaacactgattgctgctgtgtttctgctgtctacttatgtatcttcgtacctgtacgcgtctcatctctccctatgttcgtcgtattgccgatctgttaggcctacgtcttctcgagtctgttatctatntgttacagttcgcttattgttgtgatatctacatgatatatttacgtagtcttttctatcattctcttgagtctgttgcgaaaacacgcgagggaatgaagatgtgcgcgacgtactagacgagagacagtcgcgctcgccgtctgccacttgactcatgaaggcaatgtgcgacctcactcatttcatctctactctctctgacactgtcgtattccgctcgncgcgcgttatagctgactctgcaaacacactacgatatactaantatgatctctcgatagcgtcgcgtactagctggttactgtcattgtagtctagnatgtgncncgatccactttncatcccccaactatgaagcacacatgcacagacgtgtgctctgtctgtcttgtcgatgcgac

SEQ ID NO: 13339 - DNA, 572 bp, Glycine max
  misc_feature (32)..(32): n is a, c, g, or t
  misc_feature (44)..(44): n is a, c, g, or t
  misc_feature (55)..(55): n is a, c, g, or t
  misc_feature (96)..(96): n is a, c, g, or t
  misc_feature (144)..(145): n is a, c, g, or t
  misc_feature (149)..(149): n is a, c, g, or t
  misc_feature (160)..(160): n is a, c, g, or t
  misc_feature (178)..(178): n is a, c, g, or t
  misc_feature (181)..(181): n is a, c, g, or t
  misc_feature (426)..(426): n is a, c, g, or t
  misc_feature (523)..(523): n is a, c, g, or t
  Coding DNA Sequence Number=SeqID_3560
gcgtcggtgacgtcctacggctgcacgtcccncgttctgccatnccagcgcctgnctgggcatgtgcgcgcttctgtgagctcgcgatgcgtgcgngattcagtacgtgactctaatactagtcatcacgaatcgtataatgannaaanaaacaacaacnatctgatcatccgatcgnatnacgacatcagactacacgcctccgccacggtcgtgcgctagagagcgggtgggaggcgcgccgcgcccatccgcctctctcacgcggatctggcacagatatatgatagagtatgacgggatagtgatacatagcacatacgcactacatacttcactgaaagagatagcgatgtttacatcggtggagagtatgcgggacgcatcagagagaatcgcgaactcgactcgagcgacgtgtgcacncgatagctactagaagcgccagagacaaacacgagcagatcactacgatgtaattagaggatacgatgcggagaacagggacggcgtcgcgatgaangtgatatgaggacagacaagaagcgagcacatagacacgatcatcgatg

SEQ ID NO: 13340 - DNA, 166 bp, Glycine max
  Coding DNA Sequence Number=SeqID_3561
gaggagtttatgaacgatacgtattccgcaggacaggatgcagtagatcaaaacccgtcgtctggaacatgccagccttagatgctggtggtgtgacgggcgattgcgcttgcgtgtacagtggacgaagggctgttgacaaagccggtgatattcggagtagcga

SEQ ID NO: 13341 - DNA, 494 bp, Glycine max
  Coding DNA Sequence Number=SeqID_3562
ttcgccactttttggaagggccatccgttcgggcctttttcctttttcccccccttgccaaaaggggattttcttccaggccctttagtttggttacccccgggtttttcccctccccccctttttaaacccccgccccttaatttaattttggttccccttttaaaaagcttttaccttccctgcccccgttcgttaactttggtccttttaagcggcccccccttttttttttttttttttttttttttttttttttttttttttttttttttttttttttttttttttttttttttttttttttttttttttttttttttttttttaagatgaattcatatcattcatttagtaggcatctatcggctaacagaaggtacataagtaaaaaattcagggggattaaaatacaacaaccggacgctaaagattgaccaaacttccttgcattcgtaagaattattttggtatacacaatctaaaactaaatc

SEQ ID NO: 13342 - DNA, 293 bp, Glycine max
  Coding DNA Sequence Number=SeqID_3563
tggtctccggctcttcctgcaggaagaaccttggcctcttctgcttcaacaaggacgacgccaaagctctgctcaaccacgttacgcttatcgacccccacgctcgccagggctccaaagttgggcccgttgctttgaacaatgtgatgcagctcaaggcgagcggcgttgcggttatattgatacctgagttctctcaagtgaagaatgcgctgccagagacggaaaaatcaggctttgcttccagaggctatctctgtggtgcagttttccaggtgcttctcccaactatt

SEQ ID NO: 13343 - DNA, 493 bp, Glycine max
  Coding DNA Sequence Number=SeqID_3564
ccaaaccactctcgcattattatatattcgctctatttcgcgccccctccaccccatccgtttgcggaagtgctcgtgccactctcgcgacgctagctgtctgatacccgaaccaggagattgcactcgcccgccgtgtacgctttgttctttattattgcgttcacgtacagtgtataccgctgctcggcattttgtgtcagtcgcgagatactatattctatgtcgttcgcttaggccggcaacgcgtaccatctgtgtgtggtggtaagtggcgagacgcggtgctccatgcagctgtatgtttgctgcggtttatctcgcatgcgctacacacagcctcacactggctcgtcgaggatacgaaccgggctccccagtgtctgtgtctgtcttgtgtttgtggtgtgggatgaaaaggcgcatttccaccatttattttctcctcgcgctcgaggccaacgcgcaacgtgacactcgagcggccgtggta

SEQ ID NO: 13344 - DNA, 519 bp, Glycine max
  Coding DNA Sequence Number=SeqID_3565
gactcactgtatatgaatgcgcttgcactacaatcgcgggtcaactccaatggcgttatcgagcgatcattactgcccggctattactctctggagatgtcttcggcagtgtacaagagttgggtgtttactgatcaatcccttcctgcagatcttatcaagagaggaatggcaattgacgatccctgtgcgcaccacggccttatccttgtgatagaggactacccttatgctgctgatggtctaaagatatgggatgctattcatacatgggttaagaactatgtctccttgagttagccaacgtatgatgcctttcagaaagactctgagctcctagcttggtggaaggaagctgttgtgactggtcacggtgactggaaagactaatcatggtgtcctaagttgaacactgcttaagattttgttcacatatgctccatcgtcatgtggatagctgcctctctccatgcatcattgaattatggactatatctttatggaggtgtgatcctaaac

SEQ ID NO: 13345 - DNA, 387 bp, Glycine max
  Coding DNA Sequence Number=SeqID_3566
aaattagggttagggctctcatcttcctccccctttcacagccgccaatcgacgatgacaggcaaggcgaagccgaagaagcacacggcgaaggagctccaggccaaggccgacgcagcgctgaccaacagaggcggaggaaaggcggggctcgccgacaggacgggcaaggagaaaggcggccacgcgaagtacgagtgtcctcactgcaagatcacggcgccggatctgaagacgatgcagatccatcacgagtcgaagcatccaaagctgccttacgaggagccgaagaatctccacgaggctcttggtgctgctgctcctgagtcgtcttccaaaccgaaacctggaatcagaggaagcctcaagaagtgatcatctttgtgg

SEQ ID NO: 13346 - DNA, 338 bp, Glycine max
  misc_feature (61)..(61): n is a, c, g, or t
  Coding DNA Sequence Number=SeqID_3567
gtggttgacttatctatgtgatgcacatcattaaatgcagtcttgttcttatactgctcantttcctatagcgttttcttttgaaaaaacgcaaggccttgtttccataaacaatggtgtttggagcaaagaccacgtttctgctttacagaagatttgtcctatggttagcaattatatcacttcttaagcatctcctacggaagttgagacatatggtgcttcaaaactgactgttgacttgcctgtaaaatacttgcagcttgctaataagctcttttcgcaatactaactttttcatttttttccagcatccttgaacttgaaatcccatttac

SEQ ID NO: 13347 - DNA, 537 bp, Glycine max
  misc_feature (156)..(156): n is a, c, g, or t
  misc_feature (170)..(170): n is a, c, g, or t
  misc_feature (467)..(467): n is a, c, g, or t
  Coding DNA Sequence Number=SeqID_3568
cttggagcatggcacatcgcgtatccaggactacagctcggaggtaacaagcaatgacagtacagctgccggcggtgccgactggatacgatagcgcaggcgcggcggagcgatggcggccgaacgaggggacgcgccaaggtgcggtggtagaantgatatggcaacanacaggcgacgtagatgtcgaacagacggagagagacgacgagacaaaccgatgacgctggagaggcaacgaggcacacaggataaggcaccgccagcacatgctgagaggcaggaaccagaggcagagtgtaaccccatagagtgagaggctagcacaagaaatttagcgagtagacacagcgagacggcgacaaagacaaacacaggacgatgtggacgaggatgagtaggggtggggagaatgcgaggacgtggttgtagtgggagagggtgcactgataaacactagcgagaanaatatagactcctgaacgaaagcacgtcacgcgctagaagatgcagagacgtataatgcggcggcgctct

SEQ ID NO: 13348 - DNA, 453 bp, Glycine max
  misc_feature (60)..(60): n is a, c, g, or t
  Coding DNA Sequence Number=SeqID_3569
gtttgggtgtattgtagcgtctcgctctctttcacttcttcctcattgtataaagggcgngggggcagtttcgcgaggtcttccaacttcttcccacatttggggttatagttgcgcgttttgtgtgtgcctcttgtttgttaagggagggacccccaagaacccccaattgttctaacccaaatttgcacaggttttattccgggtgggaggtaggggggaatgctataataggggcccttctcccacctttgtattttaatttttgtattgtcgggttcgctcatggggccggtgcgaggagggagttcagttagagggggggaacacgagtgggggggggaacactcacacagcactatctcaacacacacaacatctccctcttatacaatatacgatacaaaatccgcgccatttataaaattttccccttcatgatatttagacgat

SEQ ID NO: 13349 - DNA, 562 bp, Glycine max
  misc_feature (74)..(74): n is a, c, g, or t
  misc_feature (213)..(213): n is a, c, g, or t
  misc_feature (238)..(238): n is a, c, g, or t
  misc_feature (270)..(270): n is a, c, g, or t
  misc_feature (298)..(298): n is a, c, g, or t
  misc_feature (334)..(334): n is a, c, g, or t
  misc_feature (342)..(342): n is a, c, g, or t
  misc_feature (390)..(390): n is a, c, g, or t
  misc_feature (407)..(407): n is a, c, g, or t
  misc_feature (473)..(473): n is a, c, g, or t
  misc_feature (537)..(537): n is a, c, g, or t
  Coding DNA Sequence Number=SeqID_3570
gtacgctgagtaacgcacaacgccggatgcggagactagagtagctgagggcgagagacgagcacgagatgtancgatcgtgacaatctacatcgctctcgcagttcgtctgcacatcatacagacgcgatgaacagcaaacacacagacgagagtggagagcagcgcgcgacaaggtccatagtcgcgaacgatacggacatataacgcccngacgacacgaggtacaagactacancgcatacgcatcacggccgtatacacatgcangcgctatacactgcacacgagatcacgncagcacgcgcatctgcacgacagagcgacaatccanctctatantgctgactcgcggcgtcctactacatcgaaggagtgaggagtagagantaaaagtatgtggatantacagtcgaagtatatatgtagtagatgatgtagcgatacgagcgatgggtgataatgcgcgtagnggtgtgtgggagttaacgtgtgggagaggtagaaatgaattacaacagttcttagatgaatgtncgatatgacacaggccgcgacgaag

SEQ ID NO: 13350 - DNA, 230 bp, Glycine max
  misc_feature (115)..(115): n is a, c, g, or t
  Coding DNA Sequence Number=SeqID_3571
ggcttgttgctgctggcatttccgagcgcttgcagcggtgacagcatcagcgcatgaggctcctcttggtgggggatgcgaaggggctgtcaggcaagacgagctccacctccancacgccatagctgcatccgtcaagtgtcggccttctcaactcatcataacaatcaaggaatattaaacaaaataaggacaagcagaagagctggctgatttagtgagagatttta

SEQ ID NO: 13351 - DNA, 549 bp, Glycine max
  misc_feature (122)..(122): n is a, c, g, or t
  misc_feature (173)..(173): n is a, c, g, or t
  misc_feature (194)..(194): n is a, c, g, or t
  misc_feature (254)..(254): n is a, c, g, or t
  misc_feature (279)..(279): n is a, c, g, or t
  misc_feature (348)..(348): n is a, c, g, or t
  misc_feature (392)..(392): n is a, c, g, or t
  misc_feature (394)..(394): n is a, c, g, or t
  misc_feature (396)..(396): n is a, c, g, or t
  misc_feature (477)..(477): n is a, c, g, or t
  misc_feature (511)..(511): n is a, c, g, or t
  Coding DNA Sequence Number=SeqID_3572
cgcactcttcgcctggaaaatatattcacgaaatatctatacacgtgtcagaactacatacgcgctcacgctatctcgtcctgggcatctaactatagaatataagatcccgcgtcgtctantctccactcgaatacacattctcgcgcgctaatcttcgcgcgtagtaccanagtacgaggactatcttcatncgcactatagtctgactctatatctctcgatatcgcacacacgaagcgcgctgactagancgagaactaccgtctagacatatanatagtaacgctatcgcgcgaccatgacatcggcacctctcgctactacctactcctatatagatcgctncgtcagacgacaggcgaatatgcacatataatgacgtgatactncncntataattcgttgcgatattatccaatactctcacgcgccagacattactatagaatagcgatatctcatcacttgcactcnatcatataccatataatcatgtctgacctaaatngtctctcgtctcgcgtgtgatatacagactccgcttcg

SEQ ID NO: 13352 - DNA, 384 bp, Glycine max
  Coding DNA Sequence Number=SeqID_3573
gccgcagcgggttttcacgcgctgagccccggcgcagctaaattccccaatgaaatcagcgaccccgtccgctggatggggtcgcttaacgttaaccattctccacccgagttcgggcggcgggcgttttttcgccacactcggccgtttaggattgtagcctgacttggttttgggggcgggaaggtaagctgcaattaaccttctcgctttaagaaagcgttcaccctctttcgcgcgctaacggggttggcgggagagtccattttgaacgctcgtcgactgggtgggctcattcgtgctggctggtttcgcacgccaattcgctgcgttgtcgttgtcccatgcgggccgtgaaggtcggatctcggatcgggctcgcct

SEQ ID NO: 13353 - DNA, 500 bp, Glycine max
  misc_feature (40)..(40): n is a, c, g, or t
  misc_feature (93)..(93): n is a, c, g, or t
  misc_feature (109)..(109): n is a, c, g, or t
  misc_feature (370)..(370): n is a, c, g, or t
  misc_feature (473)..(474): n is a, c, g, or t
  Coding DNA Sequence Number=SeqID_3574
taatgtgaccacgacgcaacggaatacgtatatatgtatntgatgataccgtaaggtgaggttggtgagttggaggttaatttcttgtactcnataatgagggcgaganaagaggaagctgctgagtatagagcgcggtcaggatgtcgatcgcgctgagcaatcgtgcgcgacaaaggaggagatcaggagagagagcggctgacatgagcccagagcgcacgcccagcacacggcgcgggagccgcgagctcgtgccctacacatgagaagacacaaacaacgacacacacgattttgcagcgctcgggacgcctcgcttgcgggctggggcactagtgtgttctattgtctagatttcatcttgtcnttcttatccttgatagtggtcctatggagcaaggctatcatagcacgagcagagcagctcataagttgttcacggtgtgtggtggggggggaggtgtgtctanncctttgttcgctttcgctccagtggg

SEQ ID NO: 13354 - DNA, 268 bp, Glycine max
  Coding DNA Sequence Number=SeqID_3575
gctgccaccgacgacggatccacgaccctcaccaccggatccgccatcgtctggatccacatgaccgcgtcccaaccttcgacggggccctgtcgatgctcttaccgaccatggacctgtgcctccacctcccccggtgcggccacaaccaccggatccagccgccaccggcccccaatgcgacctcacccgcccgatccggccgccaccgcccccctacgaccactaccggagctactatgcgcgacatttggttgcccgcaatcgc

SEQ ID NO: 13355 - DNA, 540 bp, Glycine max
  misc_feature (97)..(97): n is a, c, g, or t
  misc_feature (508)..(508): n is a, c, g, or t
  Coding DNA Sequence Number=SeqID_3576
cgtcagctcataccggcacaaggctcccgcacctacacaactcgttccagctcccttccacccccgttctccagcgtcgtacattacaccgcctttncgtgtctacacgttctctatgtagcggttatcgcaaccgataaacatctcttcatcaccccgacctacacgcaccacccacactcgtccacacccatatctctctctatcgcccccctcacacactcgctctcttacgacacctcgccacgagcagtcgaccgaatcgcgatttctatcgtgcctctctgtaatgagagctcgccttcaccttcttctgacactccttgcagtcgcgaggtatcagcgatatctactatctctactctcttcgccgccacccgatacgtctactcaatgtattgtgcgctcatcttcgctacctagcaatgtggagctattctgaacgagtaccatatgacgccaactccaacacggacgcattaccctcgccgtgctcttagctcgtctnactatacagatctctaagcacactctcgggtg

SEQ ID NO: 13356 - DNA, 330 bp, Glycine max
  misc_feature (46)..(46): n is a, c, g, or t
  misc_feature (50)..(50): n is a, c, g, or t
  misc_feature (121)..(121): n is a, c, g, or t
  misc_feature (259)..(259): n is a, c, g, or t
  Coding DNA Sequence Number=SeqID_3577
tatgagtgttgagtggtagcttgtcggttatgatgttgtagtgatnttangtgtatttatatgcacctgcaacgctctcgattcacacttccatcgtgcctcaccgcgccgctctgcctanctactcaccgcccgagttcatcggatctacgatcgccggcgcgccgggctggcgttctgtctcgttttgtgtgcgttttctcgtgcggacgagtcttgtttctttctagttccttactattcctttcctgcgtgacanataatagatgattattatgtaacatatatgttatacctatttattaactgtgtgcggcctaatatagcaat

SEQ ID NO: 13357 - DNA, 528 bp, Glycine max
  Coding DNA Sequence Number=SeqID_3578
aggagcgtaagcttcgctgcacgcagaactccggcccactgcacagagataccataagtaggtgttcactgttctagtttatgcagtgcgcggagtgagtgttaagtcgagatagataggaggatgtgaaggtaatcgatggagtgcagagatgggtggacggctttgaatctatgctcctacagctaggatacgccaggggtgacctcgcccagacccgccgggagcaagacgagaggcagctacgctgaccggtgcgtgggagtaggtaccaactaaactggttaggtgcagcggattgggagtttggttggtccatctacactacaactaaagtccaatgtgattacatgaggacatggtccactactcacttagagtgtctgacgtcttttgctggattatagataggtagaatgaggctgtacgcttcgctcacctaacaaaaaaagaaaaaaagcatgcttcttctgactcttcctgtgcgtcgcgaggggggggggcgtctctactctctgtgtggaggta

SEQ ID NO: 13358 - DNA, 526 bp, Glycine max
  misc_feature (238)..(238): n is a, c, g, or t
  Coding DNA Sequence Number=SeqID_3579
gcattggaagaggttgttccttcaatgaaaggagggtgtgaagaagaagggttgaacctggaggctactgagctgaggcttgggttgccagggtgtgagtcaccagagagggagggtgtgtttaagagtgtggtggtgtctggggccaagaggggtttctctgatgccattgatggaaactggaatggtgtaggatctgaaaagatgccgctgccttgttttctcaactccaagggtngctgtagtggtagtgtagtgctgccaagtctctcactctcactgcaacagactggacccaacaaccaactgctttgggtgctcctgttcccaggaaactgttccccctctccaaacccttacatgagattagcccccaattcctgctccgctgcaaaggcccaagttggggaatggccaccaatccgttaattaagaaaaaactccagggtttcccacccccaaaaaatgagcttgctgttaatgaaaaacccaaacccgggagcctttattgtaaagccccgctggg

SEQ ID NO: 13359 - DNA, 248 bp, Glycine max
  Coding DNA Sequence Number=SeqID_3580
aatttcctagaggttagagattcaagtaggattcccaggtttcagtcatagtaattagagaaattagaacctcgtaccccaacctcaagatagatcagttccataggcaaccttgttaggaaaatcactcgcatataggtgtcagagggatcccagtaaaatcatagtggcattttgttcagatcgctttctaacataggatttaggtgcaaataggattagtggcatatgaggattttagaaacagt

SEQ ID NO: 13360 - DNA, 356 bp, Glycine max
  Coding DNA Sequence Number=SeqID_3581
gacgaaaccctactgaccggagcgctcggcggcggcagccatgtagaacgacgattactatgaaggtgacatgggcgatgaggatgagcctccagaatgtgatattgctgaagttgctgaacaagatcctgataacaatgatgatgctcctgatgatgtgctaagtagtgaggatgaccaaaccgaacaggactacactgcccgtgcacgccctacatcgaaaatgtgacctgagatgagcggactcgcatccatggcacacgtagatttgcgataagcatgtatgttccagttatcggtgaccttgagggcgaaactgctcctctggcattggcattgacggaactgagggcccc

SEQ ID NO: 13361 - DNA, 413 bp, Glycine max
  Coding DNA Sequence Number=SeqID_3582
gaaaatagcgacacggaatcactctctaactcacaaatccactatccatcgcgaaccatacacacactaacccgggcgaatcgaaaacggcggatccgatcccggcaccaccaagatccgccactgaactcttctcggatccgctggacacccacccgctgtggttcaaaccggcatcgtttctctcccccgacttcgactccgaatcctacatttcggagctcctaaccttattccccttctacacgctccgctcctagcttaacagctacctttccttcctcaaccacgatctcatttaccttatcaaccgagactactccgatttcgtcaacctcatcaccaagctcgtcgacatcgacgctgtcgttgtgagaatgcagtccccgctcgtctgagctccgctacatgat

SEQ ID NO: 13362 - DNA, 437 bp, Glycine max
  misc_feature (91)..(91): n is a, c, g, or t
  misc_feature (113)..(114): n is a, c, g, or t
  misc_feature (140)..(140): n is a, c, g, or t
  misc_feature (142)..(143): n is a, c, g, or t
  misc_feature (145)..(145): n is a, c, g, or t
  misc_feature (148)..(148): n is a, c, g, or t
  misc_feature (151)..(151): n is a, c, g, or t
  misc_feature (177)..(177): n is a, c, g, or t
  misc_feature (179)..(179): n is a, c, g, or t
  misc_feature (184)..(184): n is a, c, g, or t
  misc_feature (192)..(192): n is a, c, g, or t
  misc_feature (199)..(199): n is a, c, g, or t
  misc_feature (221)..(221): n is a, c, g, or t
  misc_feature (231)..(231): n is a, c, g, or t
  misc_feature (241)..(241): n is a, c, g, or t
  misc_feature (261)..(261): n is a, c, g, or t
  misc_feature (264)..(264): n is a, c, g, or t
  misc_feature (324)..(324): n is a, c, g, or t
  misc_feature (326)..(326): n is a, c, g, or t
  misc_feature (359)..(359): n is a, c, g, or t
  misc_feature (361)..(361): n is a, c, g, or t
  misc_feature (377)..(377): n is a, c, g, or t
  misc_feature (379)..(379): n is a, c, g, or t
  misc_feature (381)..(381): n is a, c, g, or t
  misc_feature (383)..(383): n is a, c, g, or t
  misc_feature (385)..(385): n is a, c, g, or t
  misc_feature (387)..(388): n is a, c, g, or t
  misc_feature (405)..(405): n is a, c, g, or t
  misc_feature (408)..(408): n is a, c, g, or t
  Coding DNA Sequence Number=SeqID_3583
ggcagcgcagtcatcagtaccgacagacagctacctgactagacatacgcgcacgcgagacgactcacatgcacgacatcacgacagccantgatcgatggagaagtagaagnnagacatatgagagggtatatctctcncnnanatnttntcgtgtgttgtggtgggtgtggtggngncgtgnaccacctngtgtttntctctgtgcgctgtgtatgtgnggcgtgcgtngtgatagtgnagactgacagcgtctgtacncgntcagcactagttcgcgccggctctagctgcgcagctgcctcgcgtccagcgctaagggcngncagcgcgagcgcgcaccgacgtccgcagcagtnanggcgaaggagcacganancngnangnngttgtgatagtgaaagnacngagagctcacgacactagctatgtccact

SEQ ID NO: 13363 - DNA, 551 bp, Glycine max
  misc_feature (68)..(68): n is a, c, g, or t
  misc_feature (107)..(107): n is a, c, g, or t
  misc_feature (110)..(112): n is a, c, g, or t
  misc_feature (115)..(115): n is a, c, g, or t
  misc_feature (165)..(165): n is a, c, g, or t
  misc_feature (176)..(176): n is a, c, g, or t
  misc_feature (238)..(239): n is a, c, g, or t
  misc_feature (254)..(254): n is a, c, g, or t
  misc_feature (266)..(266): n is a, c, g, or t
  misc_feature (340)..(340): n is a, c, g, or t
  misc_feature (388)..(388): n is a, c, g, or t
  misc_feature (435)..(435): n is a, c, g, or t
  misc_feature (441)..(442): n is a, c, g, or t
  misc_feature (459)..(459): n is a, c, g, or t
  misc_feature (512)..(513): n is a, c, g, or t
  Coding DNA Sequence Number=SeqID_3584
atgattcatacacactctctatctccatctcccgtggcgtagatatcagttacctcacgtgcaagccnacgcagtccctaccacttggaccaccgtcgcacctcgcngcnnncgngagcacaacataccactcctaccacactccggcacttcactggatgggtntctatctcaanattctctactgtcaacacatatcagcacactgactaggcgacacgttgtatataattcaacnncacatacacacaaanacgagatatggnctctttatccagcgcgcctccggcgtggttgcatcactctgtgcagatcgaaatcactctgtgtacgcttactnctattctgtcttctgagtatgtacgctgactaacactcacggcaaatnagtatagtatactgcgtgatgcgcgtagctgtgacgcggcacgatcntctttnnacgatcttcggtctacntgtagacgcaatcatctctacaagtggcactcacacagacaccatatcactcnnagcgcacgtctgagacgactgagtgatacaaccgacaa

SEQ ID NO: 13364 - DNA, 407 bp, Glycine max
  Coding DNA Sequence Number=SeqID_3585
cttatcttttctccagacagagcaaaacagtctcacgatggctactaccacgtcatctccgccgtgtcatatctccgtctcattcctccgtcagcttcctccttgcaccactgttcagttcttcggtttctcaccgacccagcgtaaactgggcgggttaacggtagcccggaacaatctggcgcaggattttctcggggacttcggagctcgtgacccgtacccggcggagatagcgagccagttcggagataaggtgttgggaccccaaagcacagagcacaagattctgattcctaatgcctctgttctctccctctcgcagctcgaatgctcccctgtttcgccttctcaggctcctttatcccccgatgaggccaaaacgctcctccataaggttttgggat

SEQ ID NO: 13365 - DNA, 359 bp, Glycine max
  Coding DNA Sequence Number=SeqID_3586
aaaggtcccgtgatgcagcgatgcacccgaaaccccgtatttaaaggattttgaaaaactggcacgggtcctgctatatctctgagacaacaaaaataaaaacacgcagcaacccaataaaaacaatacgtaccggctctgacataacaagaacaacacgaacagaggcgtagctaacagatttttttggagtggatagcttttctgaatcgcttgcctgcaagccgttcgcaaccagacagagaacaataaaactgcctcaaggcggctgccggactggttgggatcaacacgatgaaagtgtcatcagcgctcaaaaaaatacgtttgcttttggtcctgcttagggatcgctcaaa

SEQ ID NO: 13366 - DNA, 88 bp, Glycine max
  Coding DNA Sequence Number=SeqID_3587
gcagaaaactctgtggtgagccaaaactgagatggcggattgcaaatacattaggcgactgaagctcaccagcagaggccactcgagg

SEQ ID NO: 13367 - DNA, 556 bp, Glycine max
  Coding DNA Sequence Number=SeqID_3588
tgctgcaccaagcagaacaccttgcccaaaaccgtgtcagtgcatttgacagtctagctggtgaaatgaaggacctgcattacggaggccagcagcagtgccagcagctggagtggtgaggtgaaatgctggtgatagggtcgatgctatgctggggcatatcagagtaaggacaggtgccactgcgtgtgacaggtaatgcagatcaaatggaggggttcctacaagaaatcacatcgatgcatgtatctgctgaaggtgggggaacaactatagaagattcagagcatgaagggataggtgggcagggtggcgctgtagtcaatgccgcagctatcaagaaggaggatgatggtgtgggtacggatgaagttaagacagaacgctcaagtgtggtggacattgacaaagagcgtgtgacgcagctgcagacagagctatatgaagaatatgtgacggaggaagcatctcgtcaagcgaaacggtagatatcagtcattgcaccatcaatgattgtggacatcatggacagtgatagcaacgatgatggcgcatt

SEQ ID NO: 13368 - DNA, 496 bp, Glycine max
  misc_feature (82)..(82): n is a, c, g, or t
  Coding DNA Sequence Number=SeqID_3589
atattctctctactcagtcgctagtgtgcacacggccgtctagtatatgtaagctatgactctatgtataacaactttgcgntcgatatcgtgcgtatgttgttcttcgtcatgatatgctatatcgtctgtgtgcaatgcacgcagcataggctacgcgtcctcaagcatagcactagaactacccacctgctacatgtagtaagtctactatcatagcgagaagcacgaggagagtacatgtctacaatcccatcaagcgctaggcttgcacattccgacaccactctctcacgtatcatactgcattcactcgctcacggctcgctacacatttctggtcccacgtacttcgcacagagcacactgcgtcgaacataatcacactctcacacgcagctcacacgctgcatgtcgctaaccgttcacgctgctgtcaccaggactcgccctacagcccgaagaagatgagcagatcttgatctatccacaaccc

SEQ ID NO: 13369 - DNA, 510 bp, Glycine max
  Coding DNA Sequence Number=SeqID_3590
atacctaaacacgttctgcgtcacgcagctacacatacaaggacgccgcaacgcgggtcaccagccagttcatcttaatacgaatatatgttcgtgctgtatgtatatagttagatctatgtcaatataatctctccgcacactccaccatacagaccaacgatccgtatccaggccaatagatcatatgtaccaatagttcagagcgatcgagacacagccagacagcggtggcgctcatttacatttatcttgttcccgctgtactgctagtgttgcgggacgtcttcagctgcgtcgaatgttgctacgtccgcgttttaggaatttctcgtctaactcacataatccccatccacgccaccataatacctgctctatatatatgaattaaacacggagccgggacgacgaataggcacagcagcggcgcacgtggaagtggttatatatgtcgtgatttcacgtcgccttgactgtctctcatcggaagacgtcacctcggttcgg

SEQ ID NO: 13370 - DNA, 573 bp, Glycine max
  misc_feature (202)..(202): n is a, c, g, or t
  misc_feature (363)..(363): n is a, c, g, or t
  misc_feature (401)..(402): n is a, c, g, or t
  misc_feature (405)..(405): n is a, c, g, or t
  misc_feature (471)..(471): n is a, c, g, or t
  misc_feature (481)..(482): n is a, c, g, or t
  misc_feature (494)..(496): n is a, c, g, or t
  misc_feature (502)..(503): n is a, c, g, or t
  Coding DNA Sequence Number=SeqID_3591
gtgaaccgcaccacagagaactgtatccacaaccaatctacaacaacacacattcaaatttcgtattgtatatttggcaccagtttattcatcattcaacaacctcacacacacaatccgcgctctcacccactatgtagtgttgttacacagtcgaaatattattggccccccacaccatgctgtcaacagagattttttngggttggcgcgcccgcgcccgcgggccgcgcggcttgcgttctcccaccacttgctctgcgtaccattacttagaacccacacaatattatagaacacccgtcttcttaccctaactcatatatgtccgaactaaaacatttccactcgacacctagtaangtaataaagagacacggtatgctccctgtgattcccanngtnaataccttatacccaccctgttgccgccgcagaggttgtgcgccccctttgtgccccaggccacgnttccggggtnnggatccgttggnnngtgccnngcgcccccaaccagtaagccacccgtcaagacaacacaacaaacatgatgccacaaaacattttgcgccc

SEQ ID NO: 13371 - DNA, 557 bp, Glycine max
  Coding DNA Sequence Number=SeqID_3592
gtgctttctccggtaaagatgctactaaggtcgacagatctgctgcttatgctgctagatgggttgctaagtccctcgttgctaacaagttcgccaagagagctttggtccaaattgcctacggtatcggtatagctgaccctatttccatccacgttgactcttatggcaccgttgctgaaggtttcactgatggtgatttgagccaaattgttgccaagaacttcaatttgagacccggtggtatcataaaggaattaggtcttaagagacccattttcaagaagttgagtgcctttggtcacttcggtagaaacgatcccgatttcttgtgggaacaacctaaggatttgactcatgaaagaaaataaatacctagattttatacacatatccatttttttaaatatgtatatgctcctgttgtacagttgtagcaataattaaatttgtactatgctcctgtaaaccagttgtagcaattcttaatatatccaataactggctgagattatagtctcaacatacatattttcctgttcagagtatgcatcctt

SEQ ID NO: 13372 - DNA, 461 bp, Glycine max
  misc_feature (26)..(27): n is a, c, g, or t
  misc_feature (37)..(40): n is a, c, g, or t
  misc_feature (42)..(42): n is a, c, g, or t
  misc_feature (98)..(101): n is a, c, g, or t
  misc_feature (132)..(134): n is a, c, g, or t
  misc_feature (268)..(270): n is a, c, g, or t
  Coding DNA Sequence Number=SeqID_3593
atgtgctatgtgtccgtttaattttnnggccagcaannnnangtttccaatcccggtccatagaccctatggggcaaacgatgttggatcattacctnnnncatcgtcatcaatgcccctatttcaaagtcnnncggtagtggtagaaaatccaatgtgtgttgattcaagtggcaaattggtgagcaatgttgttgttgacgttacagcggataagaaatggcatcatcacatatgaaaggtacagttcgcgtcattacgcatcacnnnagttgctgtcacaggaagatattgtttgtgtatatgaatatatatatgatattgcagccggcaatgggtcattggaaatcaatatttttccaatataagatttggaccaagatcctgtatgtattaatggatatgaggcgagcaatttgtagagagcccacagggcgtgatgtggcgccttgacacaaatt

SEQ ID NO: 13373 - DNA, 357 bp, Glycine max
  Coding DNA Sequence Number=SeqID_3594
gtatccccaaggacggcatcgaccgcgcgtccgccgcgctccgcgtctcgcccgctggccgcgccagcttcaagcgcgcgtcctcctcctcctcttcggcggccaggtccaagcgcgacggtggccacgaggaggcgtcggccggcagcagccacgaccacggtgttgaagacgacggcaaggcgctggcagccgagcagaagaggggacagtcgtcgtcgtcggaggccgaggcgggctcgcacgtgagccaggcagagcagagcgcgagcgccactgtgccgcaggtggcagaggacgacggcgaaattgatctggagctgaccctcgggttcgggccggccacgcgcgtgctga

SEQ ID NO: 13374 - DNA, 446 bp, Glycine max
  Coding DNA Sequence Number=SeqID_3595
taatggcgactaccttagtggcgacgacgcgtccatacgttcttctctcctccacaagagcgagccttcatctccttctccgatctccgaagagacccttcgcttcgtttctatcaactctctcatgtgctgccgccttgagaagctccagttcgagatgtttaagcgccgttttgtctcgcggagagactgctccgatgattttcggcaaaggagattctagggtttctgggtttggcgtcgtggacattcgcagccgtgggttcagtgctagatcctctcaaatcaacgatgctgggtctattgatcaaacccttatgcagtccatggagctaaagatcaaagaacagttgaatgcagagtcagtttctgtcaaggatatgtctggagatggacgtcatgtttgcataaatgtggtatcatcggcttttgagggacagtctgca

SEQ ID NO: 13375 - DNA, 569 bp, Glycine max
  misc_feature (37)..(37): n is a, c, g, or t
  misc_feature (137)..(137): n is a, c, g, or t
  misc_feature (229)..(229): n is a, c, g, or t
  misc_feature (348)..(348): n is a, c, g, or t
  misc_feature (503)..(503): n is a, c, g, or t
  Coding DNA Sequence Number=SeqID_3596
tatcgatacgagtcacagcgcgtcacgcaatcagtcnctgacacaatcattagcacttcgccggacgcctgtcacagcgagctaccggcaccgtatgcctatacgcagaccgttttgcacgaccatccatagcttcntattcgtagaggctgaatcggagcgagagcagaaagcgtatgtcgcaggtcgcggtcggcctctatcaattcgatataacaaatagtagcangcacaataaaaagccgcagtaggagtggctatctgaggtaagtagtgcgcttgttatacggaatcgtaataggcgctgagagcacgatccgaacagagctatagatgcgtgctgcctangttctgtgagtgcgcggtcgtctaaaaagcaccaaggagagcgtgagacaacacaagatggttctccgagcaatctctctagtttattctatagttattgtcgtgtcgatgcggctaacgaagaagagaagaggagagaacacaaagcatttatncggataggcccatccgcaccctgcggagcgcggcgcgccctgcggtacctccatattgcagcaaat

SEQ ID NO: 13376 - DNA, 214 bp, Glycine max
  Coding DNA Sequence Number=SeqID_3597
gaaatttgagggaggtattcattttgtggcatgccaggcctttacaccggaatccatgcaaaaccaaagcccaaattcaagagcggagttatatttgaatcaacaactgctctgaatgtggatcagacaaacaacctctgtgattagtgctaacatcaaaaccacaccggcgagtgttgcatagtcagcagccaccgcatcaagaggtaataat

SEQ ID NO: 13377 - DNA, 358 bp, Glycine max
  Coding DNA Sequence Number=SeqID_3598
aggtcaagatgtccaaaacgctttgaactatggatcaactcaggttgttcaactcggtcaaaaaagcggcaagatccccactgatacttataacatcacccaagttgccagcgtcctcaagaagaaacaacccgctggagccaattacaactgcaccgtgaccctcaagagtgctgctaatgttactgttacgactaactttaatgttttcagtaactctaccagcaacgctatgatcctcaaggcttattcttatcaagttgctggtatcaagaaaaactaaatcgtatgagttctagtcaactaactatgtgaaagtaattggaaagagtaatgaggctggttagttagttcgtaa

SEQ ID NO: 13378 - DNA, 481 bp, Glycine max
  misc_feature (27)..(27): n is a, c, g, or t
  misc_feature (40)..(40): n is a, c, g, or t
  misc_feature (179)..(179): n is a, c, g, or t
  misc_feature (347)..(347): n is a, c, g, or t
  Coding DNA Sequence Number=SeqID_3599
gcgcgcgcggctgtatgtagtatatantttgcaggagtgngtggcgtatgcgcgtggacgccgcagacggtataggcgtagtgtggaaccactctaacactgcgcgctctcctctcctctcactagcgcgtatccttctctttactctgatatcgtatagcgctactcacctcgcgtcntgctcgctgcctcacccctgtactctgcgcactcctcgcttctcgtgtgaagagctcggatgcgccggtgttggcgcgctggggtactacatgacttcggcaccactcttgtgtattatggataccatacgctctccctcgtatcctcttttctcggtcgtctcgccnctctctctcttctgccgcgttgggcaaacacgcccgagctcgttctctctcttcctcctctatgtgtttgtgtggagaaaagatacgtgacgttgcttcccgcgctgcgcttcctgtcttgtctacgcctcgag

SEQ ID NO: 13379 - DNA, 438 bp, Glycine max
  misc_feature (56)..(57): n is a, c, g, or t
  misc_feature (149)..(149): n is a, c, g, or t
  misc_feature (211)..(211): n is a, c, g, or t
  Coding DNA Sequence Number=SeqID_3600
agaagagcccttgattacgaattaaaaggatgcgttggcgaataccagcgcacacnntcttcttttcgtgcgcggccgtcgttgcgccgggatggcctggtgttgaggatgctggtttgttcgctgttgcctcttcaccgcagcttccngtctctttctatatcttcaatgtgcgttaaataaatattagttcttctctttattagtacanatctctcgtgtacagagtttgtattggatattagcactcagcactcacacagtgtatagcacctctctacacgctacattcaatacattggagtgagaacacgctgggttctttcacttgtgtgtatgcggcgtggtgtctgtttcatgttgttggggtgtctctgtcatcgatgcacaagtgtaacgatacccttctttggtcattatcccgctcacatacaaaat

SEQ ID NO: 13380 - DNA, 477 bp, Glycine max
  misc_feature (64)..(64): n is a, c, g, or t
  misc_feature (302)..(302): n is a, c, g, or t
  misc_feature (329)..(329): n is a, c, g, or t
  misc_feature (340)..(340): n is a, c, g, or t
  Coding DNA Sequence Number=SeqID_3601
gcgtttcgcgttatcgttcacgcaagagagccacgtccgtgcacgacatcattccatcaacatncacgcgctgtatctgatcgctgtatctacatcacttacacctctcttattctcacatttctattctatcttctctatgactatgataatttccttatatgatagagttttgtgcttagagttgtttgtgtcggtactattatcagttctctacatcacacacttatatctaactatgtcataatcacaagcgacgaatcgctcgtttaggtgtgacacgacgtgaaacgcgatggtantcgtggcggtctgcaagcggcgccgcncctggcgccgngccacgagctagggcgtggtcgttagagctactgtgtgagcggagatatatttacagtcttctctcttgctgcctggcaatacattcctaatattaaaatactctcttctccgtacccaacggtgaggagcctcaga

SEQ ID NO: 13381 - DNA, 580 bp, Glycine max
  misc_feature (232)..(232): n is a, c, g, or t
  misc_feature (415)..(415): n is a, c, g, or t
  misc_feature (465)..(465): n is a, c, g, or t
  misc_feature (484)..(484): n is a, c, g, or t
  misc_feature (500)..(500): n is a, c, g, or t
  Coding DNA Sequence Number=SeqID_3602
tcatgtcacacgcacgaatcatgtgcgtttctctgtcgctcgtctcgtcgttcgtactctatccacttcacgtgcgtcaatcgatatctgacatctatatctatactatcagaagtaaacaaatcttgtgttgtcttatatgagctgtgggtaattattacttatggatatggatggagggtacgccgaccatcacctcgcgcgctgtgcgtccggatactcgtctttgtgntcagtgatagcctgttctcgtgcgcatgcgccgcgtacggtgacgcagcgtggacgatgacgcgtgcagacgctaattgttatgtcgagctgcggtcgatagcgtggcgatacagtgcaatatcgcactgagacgcacagaatcgagtgcgataacaaacatgatatataacacatatagcgntagaccattctacttactagcatctagcatttctacttctatatccgctncttacgtctcacagcgtcnagtcgcgtgcgtgcgngatggtgtcgcgtcgtacgcacctaggacgtggtcgcgctcgcgcgtcttagcatgtcattgtacaatctcgccaagatg

SEQ ID NO: 13382 - DNA, 520 bp, Glycine max
  Coding DNA Sequence Number=SeqID_3603
tgaggaacactttccagcaagttatcacttgacgtttgcaccaccagtacaacgtcatgcaggcgcccttaactatccccgtgaagatcttgataagatggcacacatggataaagacggctatcatttgtatgtcgacgtcaaagaatatgagcccgatgaaataagtgtgcgcacaattgacgagacaattattgttgagggaagacagaagaaacgagccggatcaaacgctttgccacggcactttgttcgtcatttccgtcttccagagcattacgattcagaagacgtcttctcagccatttcggacgataaaattttagaaatcagagctttacccgctcacatgaagagatgtcgtcctcatattgcacctacaaccactgaggaaaagaagtgaggcttcaatcaaataaaaataaaacaaaaaaaaaaaatggtttgaaaaattattgagtgaaaatgggacgaatcaatgtttttccacatcatttctagaccaccattatttgcgcaa

SEQ ID NO: 13383 - DNA, 485 bp, Glycine max
  Coding DNA Sequence Number=SeqID_3604
ttttactttgtcactctggcgctatcaccacgtgtaaaaaacacatcgatactaggtcaatctctgtctacatcgtgctcacatctcgctaaaactatgggcatacatataggaaaacgtgggtccgtcggggtaaaaaacggtcaaaaacgggcgctacgtgtaaagcgtgtccggcatcagtcgcccacacctcccacgcgcctgtataaaataataaaaattaaaccgcgccctctctgtgggtaaatgtcgggcgtggttcaaccatattatatttcagtctcttatctgggaacaactgtcgacggcgacatcacacctaatcctcagctccctcctatttatttctttcgtatccttccctgggaacacgatacctattacacaagtcgtataatgtgctaacacttacgtctcaaatggtgttgagccgcggcaaaattatccaaataatattgaatactgggcttcaggtccactaa

SEQ ID NO: 13384 - DNA, 346 bp, Glycine max
  Coding DNA Sequence Number=SeqID_3605
gagcattgtggctcaaccagctaatatgtcttactggaatcttcctcagtcagaaagggccaagtacaggtgttatgacaacctggttcgcttcagctttggagttaagttttttagtatttgaagggtggatgtcaacaaagctgtggacgctatataaacagttttcctcattcaccgcgagtttttttcttttataaaagaaaatatttgtattgttatcaccatgctggcggatctcaaattgcaatatttagaatcgatacatagatagtatacgtgtatgggatatttgtgttgaaagaatgatactgtgtgctgctatattatggcatgctattgcccc

SEQ ID NO: 13385 - DNA, 566 bp, Glycine max
  misc_feature (66)..(66): n is a, c, g, or t
  misc_feature (91)..(91): n is a, c, g, or t
  misc_feature (202)..(202): n is a, c, g, or t
  misc_feature (248)..(248): n is a, c, g, or t
  misc_feature (250)..(250): n is a, c, g, or t
  misc_feature (287)..(287): n is a, c, g, or t
  misc_feature (330)..(330): n is a, c, g, or t
  misc_feature (374)..(374): n is a, c, g, or t
  misc_feature (418)..(418): n is a, c, g, or t
  misc_feature (497)..(497): n is a, c, g, or t
  Coding DNA Sequence Number=SeqID_3606
ttcatcatcttacactatctacgagtacacactagctcatatacaccacttatatactgcacacancacgtgaacatacacagttatgatnttactagatgcgagtgagatatcgagcacacgcacgtctccactagatcacatccaatcgtagacgtgtaaagtcgccctcggccccgcctctcgcacgctcccctccgcnactgtcggaactgctctcgcgcccttcgcctccatctacctgatcncnagatctcatattcatctccgcaccacatcacgctccntctcgcacatatagtacagatcaacgtcttacatctcagcctntatcgatagaggatgatgttagtgacattgtgtgacgcgtcgantatcatcacctcctctcatcattctacttgagtgtgatttatcntgatttgtagatatcgcgtcttctccgcaccctcacccattatccctccactcacctcgctcaccctccctaccagagnacgccgctcgcgtactcagccatgacgcatcgtgggactgcgccgacgccccatgcaccgacaagtgat

SEQ ID NO: 13386 - DNA, 564 bp, Glycine max
  misc_feature (187)..(187): n is a, c, g, or t
  misc_feature (195)..(195): n is a, c, g, or t
  misc_feature (197)..(197): n is a, c, g, or t
  misc_feature (531)..(531): n is a, c, g, or t
  Coding DNA Sequence Number=SeqID_3607
acacactattctcgatatacacctcctctgcagcggatgtctagacgacggcctactgatcatatgcacaagagatatagcacgagggtgaggcagcgtcgtattgcagattctgtacttagtgccaatctagtagtcatgcatcatctcatcgagacgacgtacatagcgacgacgccgcatactngcattgcnangcatcgtggttctgcacaactatagaatattttataacgtcgatactgtgtgcgatcgaagacggctttagtgatcatatgatggtatctatgtactaacaataaatctgattaacagcgctgtacatatatctatcctgtcagtcaggacaatacacgcatgcaccacagacaggtagagatatacacgtctagctcaatatatataataacatcagatacgggacactgcggcgattacctgaccgtcgtgacgacgcgcgcacgaccaccagacacgtcacgcatagcgcagcttctagacacaccatacgcagtatatatccgcagacgncgaccaacgacagagcgtaatctctcgtactac

SEQ ID NO: 13387 - DNA, 537 bp, Glycine max
  misc_feature (66)..(66): n is a, c, g, or t
  misc_feature (344)..(344): n is a, c, g, or t
  Coding DNA Sequence Number=SeqID_3608
gcacagagaacgacagcatcgccgtccgctgccgcagcgtcccagtgagccacgccactcgcgccntctctcccgcgctcgtccacgccggccacccgcggcgcgatgtgccacttccgcgaccggcgacgctcgcgtcccagcgtcgccggtgactggtggagcggcaggtggtcattcatatggtgagtggtaccacggttgtggcacctcaacacacaacacacacacgcacagactgcactgcggccaggacagagtgcatgaggtacatactatatcatatgtgtacgctgagagggagaaaacacagagtacagggtcacgagtaagcgtagaaggtntgcgccgaccatcgcctccacgaccaggcagatagtgagaagagtatgagtaccatcaccggagtaccacactcgacataggcacagcgaggaggcatgcacacagcatcagttggcataggagacaccgacacacgacgcactcactaccgtgtgtattattatctcttaagatgagagctatcgtacacac

SEQ ID NO: 13388 - DNA, 553 bp, Glycine max
  misc_feature (54)..(54): n is a, c, g, or t
  misc_feature (70)..(70): n is a, c, g, or t
  misc_feature (81)..(81): n is a, c, g, or t
  misc_feature (248)..(248): n is a, c, g, or t
  misc_feature (310)..(310): n is a, c, g, or t
  misc_feature (312)..(312): n is a, c, g, or t
  misc_feature (338)..(338): n is a, c, g, or t
  misc_feature (444)..(444): n is a, c, g, or t
  Coding DNA Sequence Number=SeqID_3609
gagtgtcaacgctggagtgcgcatagattcagatgtgatagatagatatatatnatagagagagggaagngagaacagtgntgctatccgcagacatctactcacttgatacagacgcacacgtgtacagcagtacgaccgtgactcgcacccacatacttatgtgtgagctggtgtacgacacaccacacacacgagcacatcaagatatcacgataagtactagggaatcggcagtactccacgcntgtgagagaaaatagctaatcatatcgagagcatgctagcactcgctcggcgcaccatatgnanacgcgacgcatgaacccgtgactcanactgtatatctgcatacggctaagtgtatgacacgtcacactgtgacactcagaccgttgcactgcacgtggtatgggcactgtcattcgatcgtctgtcagatanagacgactccatatcaacatacacgtcatactctaaaaaaatacatatgcacacagtacgtagtagctcatcactgcgttcatagacgtcaacacagaagtccgatgat

SEQ ID NO: 13389 - DNA, 205 bp, Glycine max
  Coding DNA Sequence Number=SeqID_3610
attccaactgtaggatagcatttgcatgtttccgaagtcaactcatgaaacatttgcaaataagctttatcaaacatttaagaatcacaagcgctttattaagccaaaactgtctcgaacagatttcacaattgctcattatgctggggaggtacgactaatctcatagcattagctgctgcttaaatgcgatatctttgcttat

SEQ ID NO: 13390 - DNA, 572 bp, Glycine max
  misc_feature (101)..(101): n is a, c, g, or t
  misc_feature (444)..(444): n is a, c, g, or t
  misc_feature (470)..(470): n is a, c, g, or t
  Coding DNA Sequence Number=SeqID_3611
aagtcgctcccagacgcggtattagttagtcggggccggaagggtaagcaagtcgtctcggcagtactaacagcgggagaagggaggtgcatgaggaggtnatgaagagatcaagcgggaacaagttgtcaacctaccacatacactggcgcactcgcgatccttcatgtctccacctaccgcagcggcgcgccgcggcattgccccgacctcgcacagataaatcgtcgatgaatggtcgccgcaccgccttctccttctcgtaccgggcagcgctcgtgtcttatggacccgaggacgtactgccggagccgccgagtcgacgcacccggatactgaggacagcgacacaagaagtaggagagaagacacaaaacaagagagagtccattagagatacggctcgtgacgagcgacccgcgggaggatcacccgaccatagangcactcgtcacgtatagagaagctanatggaacagtatgatgtgaagtaaaacagagaactcatagtaaatgaagaatgtataccgtccgctcatcgatcgtcgtcgcacgataactcgcttgtatga

SEQ ID NO: 13391 - DNA, 553 bp, Glycine max
  Coding DNA Sequence Number=SeqID_3612
aggtattattgtgggcctcctcttgtaggtggtagtaatccctccgcaggcgagaagtacagcaacctcttccaccacgtcatcatcatcatcttcagcggtggaggaatactttctaatacggcggcgtattcctcatcatactccttacgtggcggcagccgcctctgcggcggccgttgttgaacaattagtagtaaagaaggtggtcatcatagtgggaggagcatcgatcatcatcatcatcctcggcgccaccattgttagtgcaacaacaacagcaggtggggggggcgcaaccaccatcctacaaataacaactaaaaaggactagggggggggagaccaccgtcgttcctcctcctcgttgttagtattaggaggacagctgcaacttcaacgacgagaaaatagtcggcattttcatcaggaagagttgttttttcaacacggaagaataatcagcagtattacgacaataataataggtgaagaaaaatacttcagctagtttttttttttcaaccagcacggcatcttggtcagcatctta

SEQ ID NO: 13392 - DNA, 546 bp, Glycine max
  Coding DNA Sequence Number=SeqID_3613
gcttcttacttcactgcacgtttttcttcactctttctctctcttacatgccggaatttcctctctcttctctcccggagaatagaataaaaaccctaaaccttcgctttgctgccacacacatcagatctacactacaacttccaagttcaagaattatgtgtcactagcgatgtccgattccgatcccaaaacgagaccccgtccggggccgtggccgccggcgcccggacgccaaggcaatgccgcctgcttcctgggctaagaaaacgggcttcaagcccaagttctccggcgaggccaatgccagcgactcgggccagataagcctgcagcccaagcccagggagcccgacacaaacgtggatctcgaagcgggtcggctccggcatccgcatggcccaccaagccttccaaggatcaggtcgtaaagaagcgaaaggactccgacggactgcccaagagctctggtcccatcacccaatgggccaggcggggaccggttccgccttcctagtaccaatggccaagccactgcggagcctc

SEQ ID NO: 13393 - DNA, 575 bp, Glycine max
  Coding DNA Sequence Number=SeqID_3614
cgcgggcaagtttcgttgtatcggcgaggcatatcggcacatagagtcacctacaactcattacagcaccgacctgtcgatctgacgcactagtcacaacgctgctcgtgcagtgctgcggtagttaggtagctagtgaaggtctcgtaccacgcaacaacgtataatatgacctattcgctccaaacttgggtaatacaagagcgaatagtggggccagcttacaccgctgctttgtcagcgagtacctaggtacacaagagtagtcacagcgggggcttatagccctgtgactatcaaggatacagcaattagcgcggcatggagccacatctgctttactccgcgagtatgctttgagtaccagcgtagatactgagaacagggggcacgaaaggcactgtgaggcttatatcacacagtacaatcgttgtgtggctctaatgaccatgtctatctccgtcgtgtttctgccttcaaacaacacaaagaagaaaaaggacgtctgtagtggatgccacgaccgcacctggagagggagaggaccacccgctcgcaccatagagtggcgtgta

SEQ ID NO: 13394 - DNA, 524 bp, Glycine max
  misc_feature (26)..(26): n is a, c, g, or t
  misc_feature (36)..(36): n is a, c, g, or t
  misc_feature (105)..(105): n is a, c, g, or t
  misc_feature (280)..(280): n is a, c, g, or t
  misc_feature (443)..(443): n is a, c, g, or t
  misc_feature (447)..(447): n is a, c, g, or t
  misc_feature (462)..(462): n is a, c, g, or t
  misc_feature (464)..(466): n is a, c, g, or t
  misc_feature (468)..(475): n is a, c, g, or t
  misc_feature (477)..(477): n is a, c, g, or t
  misc_feature (479)..(479): n is a, c, g, or t
  Coding DNA Sequence Number=SeqID_3615
gcgacgtgctcctttgctcgaggagngagagagagngtgataaataggatgccatggtgcgtcctcgcagacatggaggaagctaatcatactacgacacgcagnccctcgtagcgctacctcatactaccctatctagcagcgcctacaggtacacgacgattctgcggcatccccgccagacgcctcaagcacacacacactaacgcactccatcgcggctgcggcactagtgtttagacactcttcacgcttctgacttgtaaaggtaagtgtcgantatcaggggctgacacgcgtgctcctcgccgttgataatcacatcctccctaccgcgacccgccagcgggagagagcataccactaccatattcttaacataggaggcgggggcgcaccatcccgtgcaccataagatgtagatatcccacaccctactcttnattnaggagtgggggagangnnncnnnnnnnntntntaataactcacaaccacaccacctcttgctgttgggcgtcaacgc

SEQ ID NO: 13395 - DNA, 563 bp, Glycine max
  misc_feature (198)..(198): n is a, c, g, or t
  misc_feature (369)..(369): n is a, c, g, or t
  misc_feature (416)..(416): n is a, c, g, or t
  misc_feature (423)..(423): n is a, c, g, or t
  misc_feature (475)..(475): n is a, c, g, or t
  misc_feature (479)..(479): n is a, c, g, or t
  Coding DNA Sequence Number=SeqID_3616
gagtactgcaccaacggccaattatgtatataacgtgaagctcttgcattctctaccatactctccgtatcgctggatttatgctctaaacatgatctgatccatgcatgcgatcgtgtatactgctcacccaccgctctcacacttcctccataccaatctcactacatattgattatactctccactggctcaccncacacactcttatagtatatcctgaatgctggaccgactcgtacctgagacgacagcgccgagcacgttgttcggatgtatatgtcgacgcgatcattagagctacgatgcatctaacgctacgccacgacgagcttcgatctctcgctctatcgtgtgacctacgtcgtngtgtgtcctgtctgatggcgcgggtgtgtcatagagagtgcaccatnctacatnatatcacgatgcgtatacggtgtgcatcacattacgtactacctctgttcanacgngataccagtcgctcgtactctactggatcacacgctactcattgctaactctggtggcagtataatctgctcactgtcacgatg

SEQ ID NO: 13396 - DNA, 337 bp, Glycine max
  Coding DNA Sequence Number=SeqID_3617
ttcgtttagcttcgctcatccccagctgcatatcgcacgacttcaagatgccgtcccacaagtcgtttatgataaagaagaagctggccaaaaagatgaggcaaaacaggcctatccctcactggattcgtcttcgtaccgacaacactatcaggtacaatgccaagcgcaggcactggcgcagaaccaagctcggattctaagtggaagctcaagactgtttgtcttctgttcgatttagcatttccccgaatcttcttgatttttgttataaacattttcacatatcttgtaagacttttgatgttaccagattttatctttataagagctacgt

SEQ ID NO: 13397 - DNA, 417 bp, Glycine max
  Coding DNA Sequence Number=SeqID_3618
ttttttgggagcaagggactttgatttttccaaaaaagttaaagcaatggaatttttggccgccccctatagcttttacaagttagccctcaacaggggtcgaattttggctctaagcccaaaaaaaaaaacagttatttcagggggttgaaaatgggcccttggattaaaaaaacccccaaaaacctccctaataaaacggccaaattccccacttaataatgaattttccaaattcaaaattatccccccctcccccagctctgtttctctttcaacaagaaaattggccttaagccttaaacttctgcttctggttcgaagcctatggtcatcatcaaaagaactataatcttcattaaaatggggaaaaaggctatgctcatgggccgacaaaatatcatccctatgtccttg

SEQ ID NO: 13398 - DNA, 563 bp, Glycine max
  misc_feature (159)..(159): n is a, c, g, or t
  Coding DNA Sequence Number=SeqID_3619
gttgcggagagcactcactatgtgtatctggtgcgacagatggtctcatcagcgtgcgagatgtgtagcggtatatgttatcctgggcgttaatgatacgcaggtgtgtatggcgcgcggcacgaagatgacagcattcggtaagatactggagcgaanatcgcgccgtcgcggcttctaacatcttatccaccaacatgcgtggacagaggagaatacagcaggtagttatagactgatggcatgagtaagtaacagaactcacacgaatatgagtgagtgtgttcttctgacagacgaggtgtgtggtggtgccaggataagtggtgttgtttgtatctgtgtatgctgcttatctggatgcgagcgggtgcgcgtgtatgagaacacgtgttgaggtgtgagaagtcgcggagacctatttctaatctacagcactcagcgcagagacgtaatagtgatgtgattatagcggccgccacgcgcgtgcggacatctatttgtgtgctgtgatgcgtgttagggtacgagggagtatgtaacgctggatgtgtcgtcatggt

SEQ ID NO: 13399 - DNA, 595 bp, Glycine max
  misc_feature (195)..(195): n is a, c, g, or t
  misc_feature (200)..(200): n is a, c, g, or t
  misc_feature (216)..(216): n is a, c, g, or t
  misc_feature (252)..(252): n is a, c, g, or t
  misc_feature (280)..(280): n is a, c, g, or t
  misc_feature (288)..(288): n is a, c, g, or t
  misc_feature (362)..(362): n is a, c, g, or t
  misc_feature (382)..(382): n is a, c, g, or t
  misc_feature (436)..(436): n is a, c, g, or t
  misc_feature (459)..(459): n is a, c, g, or t
  misc_feature (516)..(516): n is a, c, g, or t
  misc_feature (526)..(526): n is a, c, g, or t
  misc_feature (532)..(532): n is a, c, g, or t
  Coding DNA Sequence Number=SeqID_3620
aggactacggtcatgactcactgctaaccgtgcacgctatgtatacgccaacagcgatgtacgccacacgagagagacgcgtgtgaacgatacgccatagcgatctcatgaggtgtacacagagtgagtctgaccgcgactccatgtaacgactcgctgtgtcgggcgtgtgcagaagagcggtgcgcgaactgncgcgncacaacgaggacactnacctactgtcgcagtgtcactcctgatcgatacagnacatcgtgctcgtctcatcacagaccgntccccgtncatgcccatcgacgctcacgtgtaagtatcactccctcgagccacgacgatgcgtatgcacacagtaatctacntcagctgctcctgctgcacnacgtgcagtcgtacgctcgtagcgaagttctagtgtattcatactgttataacntcgcactagcaaatatactactnagcatcagctataccatggcggactatcgacggtgcaatgagcagtagcagatactngatgcttgcncgtgcngcgctcgagagcgtcgatcatagtaattacgatgatacgtcagtcacactaacatcggctatc

SEQ ID NO: 13400 - DNA, 493 bp, Glycine max
  Coding DNA Sequence Number=SeqID_3621
aaaagcgctcaaaatcaagtagaagaaattgaagagatccaaagaactgaaaaggttgtagaacccttttctgctcctcagaatgagaatattttgaatgacataaaaagtgaaacagagcagcctgcagtaccaagatatgaagaaccacaatctacaccaatttctgcaacaataacaaactttaaagatcatgagaaaaaggtggaaacatcatcaaatcacacaacacaagctgattatcaagaaatagctcaagcaaaatcaagtgatggtacaaaagaacttctcaaagaattgcaaaccacaaatctgccagctcgagttggattaccaccaactgatttattcaatgtggtagcaaatagaaattatttattaatgtttacactgatttggggtttacagctattcttaagatctatattttaaagaaaccttataagattcataaaagcagtgaaatttcattgagttcgcttttaattcttaa

SEQ ID NO: 13401 - DNA, 436 bp, Glycine max
  misc_feature (227)..(227): n is a, c, g, or t
  misc_feature (396)..(396): n is a, c, g, or t
  Coding DNA Sequence Number=SeqID_3622
tcgtttaatctttcattttcaccaacaagatagttgaccttgttttcatagttgttagagcttctcttggtcttttcgacttctctgttcaaattagcattcctgccttcaatttcagcatgcttatttctccattgttcagcttctcttcttctttcttcgatttctctggaaagtctttccttttcagtcaagagtaaagcaagcttagcttgagcatcaccaanatccttctgcattctttctaattcagcacatcttgatctcaatccatcaagagctctatccttatccacaataatgtcatttaatctttcattttcatcgatgaggatcttgaccttttcttggaggactctaacagtattgttaagttcttccaattcggcacatctnttgaacaaagcttctctttctctgctcatttcactgatga

SEQ ID NO: 13402 - DNA, 510 bp, Glycine max
  Coding DNA Sequence Number=SeqID_3623
ttacgtgtctgctgagtttgttttttataatctgagagataatagaatagaccgaattcaagattttgattcctacaagttttcatttctctctcatgattatgttccaagcttggttttgccatataaaaattaaggggatcattgctggcctgggaatttggggttccatgtgagtttcttcatttctgtttgagacatcagcaatgacatctccctcatcacacaaccttttgtgtgttttcattgttatgctgctattatcgtccaagttaggtttcgccatagaaaaattaaggtactgcgcattggtcgttttcgctgggtcttaaatcatgtaagtgacatgaaggctaaaatggtgctgatcggaacggcttgctctcgtcaggggatgattccccgcctgggatttggggttctaagaggtggtctgcatttctgtttccgactcctgctatggcagctcccccttctctctcccccgttgtgcgttttccccaatgtact

SEQ ID NO: 13403 - DNA, 481 bp, Glycine max
  Coding DNA Sequence Number=SeqID_3624
ttattccacaatttaaatgaccctaatgcgtatttttttaagttgtccgttttgggtttcctcaaaatttaagccgatttttccatcccccctgtttcgactaaaaaaaggaccggggccccaaccccctttgaacaaaagtttttttttttatcccccaattttttttttttttccaacctgatttttacttcccccctgttaggacaaaaaattggtcctccccccccgttgccttttaacaaaagtttctttttttttccccgaattttctattttccccccccatgtaagggacttttttctaaattccaaaaatattctttttacaaaaaaaagattccttcctccatttttttacaatgtatgggggggaaaacaaaattatagaaatagaagtttgattcaatttcatacatccccaaaggaatcaaacttcaattgtaaaaaaaaattttttcatttcgtatattccaaagaa

SEQ ID NO: 13404 - DNA, 596 bp, Glycine max
  misc_feature (158)..(158): n is a, c, g, or t
  misc_feature (189)..(189): n is a, c, g, or t
  misc_feature (200)..(200): n is a, c, g, or t
  misc_feature (206)..(206): n is a, c, g, or t
  misc_feature (211)..(211): n is a, c, g, or t
  misc_feature (219)..(219): n is a, c, g, or t
  misc_feature (221)..(221): n is a, c, g, or t
  misc_feature (228)..(228): n is a, c, g, or t
  misc_feature (255)..(255): n is a, c, g, or t
  misc_feature (276)..(276): n is a, c, g, or t
  misc_feature (320)..(320): n is a, c, g, or t
  misc_feature (336)..(336): n is a, c, g, or t
  misc_feature (347)..(347): n is a, c, g, or t
  misc_feature (368)..(368): n is a, c, g, or t
  misc_feature (370)..(370): n is a, c, g, or t
  misc_feature (441)..(441): n is a, c, g, or t
  misc_feature (496)..(496): n is a, c, g, or t
  misc_feature (500)..(500): n is a, c, g, or t
  misc_feature (521)..(521): n is a, c, g, or t
  misc_feature (525)..(525): n is a, c, g, or t
  misc_feature (527)..(527): n is a, c, g, or t
  misc_feature (529)..(529): n is a, c, g, or t
  misc_feature (558)..(558): n is a, c, g, or t
  Coding DNA Sequence Number=SeqID_3625
ctgctgcaacgtacgtcatgtatacgttgatagacagcagataccatgcgaaccaatacactcagtcctcatatcatagcacccacgcatcaatgcggtcgcgctccgcgtgtctcagctgtgctcgacagacgacagatgacacagtacccgatcancatctgctgcagacactatactgctatctcnacatacacacncaacancacgnacctcgcntntcatganatcagcatagtacgaccgtgcgctgtncacactctatcctgtgactantctatcgtatatatgcatatgattctcatatgctcctgtgagcnatagttcccactatgncaatctcatantcggaaagcccacgatcagancncagcactgactatggcccgtgcgccagacgcagagctagtcagacgacgagtcactcgtagtagtacatantgtctactgcatgacttagagtatactacagtgatctgtgctagtccacactgcnacgntgctgacactgcgtacaacancatnanancacgacatactgatctgcacatgtactgnattatgtgatcgctcatctgcacatcgactatagcgtc

SEQ ID NO: 13405 - DNA, 486 bp, Glycine max
  Coding DNA Sequence Number=SeqID_3626
tgaagcttctttccggtactagttgttgcttcctatcttctattcttctgcatcatacctacaaattttatgctttggaggtgctcaaaggtcatcgacgccgcctggctgacatcctaatcagtgggaccgaggagttcaaagataagggggcacaacatgcaaatgagtcacggcggcaagcaggcgaatcagcaatggaaactagtggcaaaacgtccattggtgatgaagactactggtgcaatgagaacctagctcaagacaatgggcctgcttgcttcctagcaagcaacacggctgcttcgttaagcttcacggagcaaacatgtagcaagtagtaggtattttttgcttggaaacaggaaatgacatgcctgcttgtaaatgttcacgaaagtgaacgaacatgaagctagtaggaagcatgtagcaccaatggccagcttgaggggccgcattgtcacatcccgtacagaagcaagt

SEQ ID NO: 13406 - DNA, 397 bp, Glycine max
  Coding DNA Sequence Number=SeqID_3627
tggtctacgacgaaaaacctcacgtgcatagggctgtagctttttgtttgtgtgcacaaatccactttttgagatttgaaggcaaaagggcattgttcttacggtgatcatgataaaagggtcactttgtttgctctattagttagtgcccttgctttggcctttgctaaagtaagtaccttcctttcttcgcccaaaactgtttttagcatctaatcattaaccttcatcttccgtgctttcccaaaactgttcttagcatcatctaatcattaaccttcatcttactctaaaaaaaaaacgaagaaactttcttatacaaccccccctctctctccttttctctttaagagaccttttctcctcatctctgcttgctcctcttgtgaacaaaaaa

SEQ ID NO: 13407 - DNA, 578 bp, Glycine max
  misc_feature (60)..(60): n is a, c, g, or t
  misc_feature (70)..(70): n is a, c, g, or t
  misc_feature (120)..(120): n is a, c, g, or t
  misc_feature (152)..(152): n is a, c, g, or t
  misc_feature (168)..(168): n is a, c, g, or t
  misc_feature (171)..(171): n is a, c, g, or t
  misc_feature (185)..(185): n is a, c, g, or t
  misc_feature (189)..(189): n is a, c, g, or t
  misc_feature (198)..(198): n is a, c, g, or t
  misc_feature (202)..(202): n is a, c, g, or t
  misc_feature (251)..(251): n is a, c, g, or t
  misc_feature (267)..(269): n is a, c, g, or t
  misc_feature (297)..(297): n is a, c, g, or t
  misc_feature (314)..(314): n is a, c, g, or t
  misc_feature (316)..(316): n is a, c, g, or t
  misc_feature (323)..(323): n is a, c, g, or t
  misc_feature (359)..(359): n is a, c, g, or t
  misc_feature (368)..(368): n is a, c, g, or t
  misc_feature (384)..(384): n is a, c, g, or t
  misc_feature (415)..(415): n is a, c, g, or t
  misc_feature (473)..(473): n is a, c, g, or t
  misc_feature (480)..(480): n is a, c, g, or t
  misc_feature (533)..(533): n is a, c, g, or t
  misc_feature (535)..(535): n is a, c, g, or t
  Coding DNA Sequence Number=SeqID_3628
gagtcgtgcgctctacgtagtatagttgaccggatgtgtatagataacgcatatctcatnatagacccanatgacgccactgcgacgtaacgcgtgtagagtagccgcgagtcacggcangacaggatcagacactcaccctcgtcctcatntcctcgccctcgacgngcnggagagtgtgaaanaganagagcaganctcncagactccagtctcacgcgcgtcgtgggaagatcactcccgagccggangtgcgtgatgtatgannngctgtatagaagtgagtgcgcgtctcgngtgatgactggggcggnancgcgtgnacgtgggcaacgagaggagagctatcagatgttgcngctcgtgtntgctcgtctccactcnccgcgcctgcatcagagctatctaccagagngacgctatagagcacacgactcggcactcatacgcgatagtccacctacgatcactcncactgcnctctatagtacattaactacatcatattgatcgcacctacgcctactctatanantgcattactaacacaacgctgtctcgctctacgctgatgcaga

SEQ ID NO: 13408 - DNA, 460 bp, Glycine max
  misc_feature (35)..(35): n is a, c, g, or t
  misc_feature (154)..(155): n is a, c, g, or t
  misc_feature (174)..(174): n is a, c, g, or t
  Coding DNA Sequence Number=SeqID_3629
atcgtctgcgatcaatattctcatttaatgttccntgtttgatttgcagtactgctgatggcgtaaagttaatgagttctggttaacttactcgccattcatatcaagttccaataaacaaataaagcagatagccgaaccaacgggaatctgnnacaccaaaactccaaaaangtttatacgatcctgttaggccaagaaataaaataggggcggagaagattcgccctattccgtagtttttggatagaatataggattcgtatagctataaggaaattggaatcagggatagatttactaaaactcatacaaagctaaccagagaaaaagattaagtttctgtgtaaatcaccatttcttaacggtgaaaacacggaatttttcagtgttctaacttcgtatttttcccattccgggacctttcaccccatcatttcttcaatttgccggtcattca

SEQ ID NO: 13409 - DNA, 581 bp, Glycine max
  misc_feature (94)..(94): n is a, c, g, or t
  misc_feature (240)..(240): n is a, c, g, or t
  misc_feature (390)..(390): n is a, c, g, or t
  misc_feature (501)..(501): n is a, c, g, or t
  Coding DNA Sequence Number=SeqID_3630
tccctccacgccacaataatgagaggtgagaggggaggaacgaagaccacgactaagtctgcgtgaaataatagcatatacacaaatatgcgtngacggaggttgtcgatataaagatgttaggatgggcaggccataattgagtagagtaggttagatatatccataaagagacaaacagtctagagacagatgagaatcagacacatatattaactctcaggtcgcgttatgtacgtnacgtctggttgttgagttgtgtattgtatacttattgatattaagtgtaatgagggtcaagacgagcatggtagcgtgcaactactcctacactcactccaacttcatcataataaatataaatagcgttataaatgtaaacatagtctnacaccatcatatatattcaaatcaccaaaacaaattaaattacacatataagactcatatatatcacactttgtgggtagtcgatctgtagttagaatatgtagagagtgngtaccgccaggcacgatggcatcataatcataaatattcgacatgagagctaatagatatcgtcgccacacagggagaga

SEQ ID NO: 13410 - DNA, 458 bp, Glycine max
  Coding DNA Sequence Number=SeqID_3631
ccaagtgacggaacggctgccagaaactgccgccggtgtgcaaacaagaccctaacaacaaccccccgacgccgctgactggctccccgccggacacacgggaacgccccccccaggccctggcaacaaagaacttgcaacgcaaatgtgccccccccccctaccccatgggttgggaccgcaaaaccaacacaccctccgcatgggcgtccgaaaccccacgccagtgggtgggcttcccacccccgccccccccggccccacgggcccaaaaagaacacctggacatcggccacaccccacatcccctcactccacttttccccccctcccaccccaaacaaaaggtggttcgggacttcgaccacccgcgcgatcaaacaccccgccgaagcggccaccgcgcggggggagggcccgcccgaaccaaaagaacaaagcaagacacgcgcccaact

SEQ ID NO: 13411 - DNA, 587 bp, Glycine max
  misc_feature (357)..(357): n is a, c, g, or t
  misc_feature (420)..(420): n is a, c, g, or t
  misc_feature (540)..(540): n is a, c, g, or t
  Coding DNA Sequence Number=SeqID_3632
gaatacgtgtggaactgcgcatctatacatacgtcggccaagacctcacccctcgaaccgctgtatacggacactgatcgatataggaaacataaacgacgccacaccgaccacaacgacgactataatagtagtcatagaagcacaccacatccgctcctcatcatgcgcgtacaggagccgcttaactatcgcatcgatagcaaagataaactctcaccacacctacttcacgtctcacacccactcgcgcgacgtcggaacaccgcgcgcgcgtcgcacccacgaatatcgacgcgcgattcacgcaccgttaccacgaccgcaaggaatgggactagaccgactcgcgcgganatcatagcactcgagcatatgctcgagtatagtagatatatacaactgtcacgtgaggccaanacgatgactacatcatatgcactctcaacactacctctagtaatacacatgcgatcactaacatacttctcgtgcgtgtctgtctcttcgcctcatgtatcagttcccattcacctctcnccagctcgcatacactacacacatgacacagaacgaacgcggcgcgc

SEQ ID NO: 13412 - DNA, 501 bp, Glycine max
  misc_feature (71)..(72): n is a, c, g, or t
  misc_feature (126)..(126): n is a, c, g, or t
  misc_feature (179)..(179): n is a, c, g, or t
  misc_feature (190)..(190): n is a, c, g, or t
  misc_feature (216)..(216): n is a, c, g, or t
  misc_feature (250)..(250): n is a, c, g, or t
  misc_feature (264)..(264): n is a, c, g, or t
  misc_feature (350)..(350): n is a, c, g, or t
  misc_feature (352)..(352): n is a, c, g, or t
  misc_feature (354)..(354): n is a, c, g, or t
  misc_feature (356)..(357): n is a, c, g, or t
  misc_feature (406)..(406): n is a, c, g, or t
  misc_feature (418)..(419): n is a, c, g, or t
  misc_feature (421)..(421): n is a, c, g, or t
  misc_feature (440)..(440): n is a, c, g, or t
  Coding DNA Sequence Number=SeqID_3633
atctatccacgtcgcgtcgccttaactgcatccctctcttacgtcgtatctactcctcgcgcccacaaccnnttgtatcatacgcatcattcatcgtcgcacagccccagcgatgacactgtctgnattatactcgtcgctcacacactctcctccgctacactacaacaccaccaccncacacttgtgnagatgtttttccactaccatcctatnacagccagtcatcacacctcgcgcctacctgcantacacacgaccatncacgtccaccacatctcgccactctcgtctcgcggccttactatacatgacctattgcgctgagtcacgactcaccattctacaantncntnntctcacatacttgcaccactagactatgcattctagcaatacacaccancaactcagcganncntatatcatctcgtgcacgntcgatcactgcaccatgtgcgcagctgccgactcacggcacactcacctagcagtacatta

SEQ ID NO: 13413 - DNA, 293 bp, Glycine max
  misc_feature (31)..(31): n is a, c, g, or t
  misc_feature (44)..(44): n is a, c, g, or t
  misc_feature (58)..(58): n is a, c, g, or t
  misc_feature (104)..(104): n is a, c, g, or t
  misc_feature (110)..(110): n is a, c, g, or t
  misc_feature (144)..(144): n is a, c, g, or t
  misc_feature (147)..(147): n is a, c, g, or t
  misc_feature (155)..(156): n is a, c, g, or t
  misc_feature (158)..(158): n is a, c, g, or t
  misc_feature (167)..(167): n is a, c, g, or t
  misc_feature (215)..(215): n is a, c, g, or t
  misc_feature (240)..(240): n is a, c, g, or t
  misc_feature (247)..(248): n is a, c, g, or t
  misc_feature (251)..(251): n is a, c, g, or t
  Coding DNA Sequence Number=SeqID_3634
gagaagcaggatgacatctatatatataaangataaagtatatntggatgtcacgcanacatgtacaggccgagtatacatcatcacacctcacactatatatnaatttnttatgcatctgagctcgctgtcgcgtacctgtgncantgtgtagnnantggccgtgnggacgcgcgaaaacaggatggcaatggtcacagcgtgtcagtgacgcnacaccctcggacaccgccgtcctcncctctcnnacnacatatacccgagacagtgcgcggacaccgacgtgtgagcta

SEQ ID NO: 13414 - DNA, 541 bp, Glycine max
  Coding DNA Sequence Number=SeqID_3635
ggacttttaatcgttctctctggaccttcgggagttggaaaaggaacggtcagacaagccattttctcccaggaagatacgaaatttgaatactctatttctgtgacaacgcgcaaaccgcgtgaaggtgaaagaaatggtgtcgattatttctttaaaaccagggaagaatttgaacatatgattgaaaacaaaaaactgttagaatgggcagagtatgtcgggaattactacggcacgcctgttgactatgtagaacagacattgagcgaaggaaaagatgttttccttgaaattgaagtgcaaggcgcacttcaagtaagagaagcattcccagaaggtctttttattttccttgcaccgcctagtctttcagaacttcaaaaccgcatcattactcgcggtacagaatctgaggagctcattcgaaaccgaatggccgctgcgaaagaagaaattgaaatgatggatgcttacgactatgtcgttgaaaacgatgatgtcgagcttgcttgtgaaagaatcaaagcgatcgtccttg

SEQ ID NO: 13415 - DNA, 517 bp, Glycine max
  misc_feature (66)..(66): n is a, c, g, or t
  misc_feature (135)..(135): n is a, c, g, or t
  misc_feature (222)..(222): n is a, c, g, or t
  misc_feature (234)..(234): n is a, c, g, or t
  misc_feature (333)..(333): n is a, c, g, or t
  misc_feature (343)..(343): n is a, c, g, or t
  misc_feature (389)..(389): n is a, c, g, or t
  misc_feature (415)..(416): n is a, c, g, or t
  Coding DNA Sequence Number=SeqID_3636
ccacgagatcgggacggatgactgcgcgagtgatcgaggagcatctaaacacacacacaccgggangcgagccggaagatagcacagagatgagtacacgcgagacgagcagaaggtagcggacagcggccgcgntagcgagacaagacgcgcgcgatacagcgacagagctagcgagagtactcagcacgcagcggacgagatgcgcatgacaatataganattacgaaccgnagacagcgcgcggtcacgagcgacgaccgccacacagcgagctagggctacacagcggtagatgatggacgaactcgataccgagtaggcgaacactancgtgacgggnagacagcgagagcgaagacgagactgacgatacagatacacgctangagtcacggcaccggcgcgcgaacgnngcgcacgaaggagtgacccgtgtacgcagacaatcgagatagacgcatggacatcgcgcacacatacgtctcgaaggacatggaatccgagcgtcgcacaa

SEQ ID NO: 13416 - DNA, 596 bp, Glycine max
  misc_feature (215)..(215): n is a, c, g, or t
  misc_feature (366)..(366): n is a, c, g, or t
  Coding DNA Sequence Number=SeqID_3637
accgtccgctgcgtacataatgtacgcgtataggtgagacaagcgaggagtcttgaatgagacgcattatactaagtattttgcacgcacatactacgctcggctcgcggcatctgcgtttggtattcgtagatgaattataggcgaatgaagcgctgcgggacctatcacgcgcatcctatgaatcaacatactccctatctctcgcgatcacnatctctgatcgcgcgattaactctatgctgtataatactctgtttctcggggagagggtagctgtgtgtgtggatggatgtgggtgtgtagagggtcaacacccaactacttcgtactatacgtggagcctctaagtggcgtcgttgcgcntaacgaggacaatattgtgtatactcatctgtcattgttcgtatcccatacaggggtcgcgtggccgtggtgcgccacatactccgcagccgtgcaacccagcgcggctttgtgtggggacgcgccgggcgcggacataaaggaggtgaaaaaagggtgagtaataatgatatagtggcgggtttatgagttgtgtgatagtggtcttcctcacgtctctctgtgcgaaa

SEQ ID NO: 13417 - DNA, 434 bp, Glycine max
  Coding DNA Sequence Number=SeqID_3638
agtgccttttcttaggatgaagctcttgtggaaatctcacgtgagggtacaagtaattagattggtttgtgctctccttttggtgacactgctgagctcagaggtagctgagagcagaaaagccaaaactgctagaacttcctttgagcacaaagctataaattgcagggctcatagtgcctcattgattgatgaatttgggggcgccggacatgggaatacatcaaattacaaaggcttttcagtctgcaatcagtcatctgagccagtatgctgctcaaggaggggctcacgtgaatgtccctgctgcgaagtcgcttactgccgatttcagcgctataaatcacttcactttgcatctagacgaagaggcgtctcctctggcatcgcacgataccgcacagcgcgcccgcgtggaagcactccgatcggac

SEQ ID NO: 13418 - DNA, 550 bp, Glycine max
  misc_feature (335)..(335): n is a, c, g, or t
  misc_feature (402)..(402): n is a, c, g, or t
  Coding DNA Sequence Number=SeqID_3639
ttccaaccaatactctaccgataatactacacctataccactactgagtattgaatataatatggtgtatggtctttacggtcccgatcccattgatgagtgtctatagcaaattataaacatcttacgtactcatctccgtctcgaacacaccattgccgtctcttaaaagacacgataactattacacacatcattggccgagcaaagaatgggtggcagacatgaagtattaataataacttccaacccacccactcacctacacatacactgcacagaagaatgtgaggttactgtttattgatactctctctgcgcctagtcaacacaangcgtacaccaggtaagacgactaagctgacgatactaatatgctcgtaacagaaagactaatatatntcaccccacacaccaacacaccacagatatacgatgaataatattttaagaatcatagctctttcattgtgtgagtgtcttctgttgtgatgtgtaccgttcaccctctccgtcacactatcttacaataccattctatctctctcac

SEQ ID NO: 13419 - DNA, 549 bp, Glycine max
  Coding DNA Sequence Number=SeqID_3640
tgtcgccggttatcttaccctaagaggctaagagggcaatctcgcggtgagctccattgttggagttcattggaattggcatgcacattgtcatctcgtgttgtatggtgtggggaggttgaggatgttgaccgcattctcttctttttgtgccgtgtgatcgtttgagaggttgccctgaagtattgccttgctactaggtccacggactcattcaaacccaatttgtcttaagctgggagaatggagtcttgtcttctttctgctgcagttatggcttgggtggtcttgcctttgtggctgctaaccaggaatcatgcggtggattcacctctgcatccagttacacaagttgttgaacatatggggctggtctcggcaaagcgcgtgcagtcagtcggagctgaaggtgtgctggatctgtacaagattcaaaccgggctactcaaaaatagactggtgggcatttaggaaatactgtactactagtaccaagatggcacaggaagaggcaagagcactagagacccagaaacttgcgttgtatgt

SEQ ID NO: 13420 - DNA, 430 bp, Glycine max
  Coding DNA Sequence Number=SeqID_3641
ttggaatactcagctcctctctaaaattcagctcttccttttaaagttattcacggtgttgaactgacatgtgaaaatcttcagaagcgaggtgaaaacacaaactggatcagacgcggtgctacagagaccatgttacatctctttcgccaaacaggtttgggagttgatcccatggctcttcaactcaagtttggctgaatcattcggtaaagggcaagagacatcccacctgagaattaatctacaaggctttcgccaaggaccaatctctttccaaggttgcttgtgctatcaggaactccagaactaactcctcatcgagaacatgatcaatctctgttgcggcatggaaaacggtcaagaagagggacggattcgattggatcttcactgattggcaccaaacaatctctctcggtatcattca

SEQ ID NO: 13421 - DNA, 573 bp, Glycine max
  Coding DNA Sequence Number=SeqID_3642
gaaactatgcttggagggtgactaagggtcctctgggtttctacgacgacgagacacggcactcatacgggtgcgatgctgcattgatgcatggcgacaccatctccgccgcgcgtgaaacacatgcgaggagaatctggtccggggtatataaaacgaaaaaggaggacatctgctacttcatgccaagctgtgtgggtcgagacggacatgtatcaatcggaaatcgcagcctccctcgctgcgcgcacatccgtctactcctccgaggtcgccctactgctgcgtatactctatagcttactcagtaagtctttaggcacaggccctcaattccttcactcctgcaacgaacgtacggaggatggcgcgggaggtcctactatgcatgccgtcgggtcgaggctgcaggataatgaatagtctttggcgtactgggcatgttatgcggtaagtggtctacgtgcgaaattccacgcagccccggggggaccctctcactcttagactcgccccgcccccgccggtggagctgcccaccccgggggagacgctcccatcacacataaagag

SEQ ID NO: 13422 - DNA, 588 bp, Glycine max
  misc_feature (130)..(130): n is a, c, g, or t
  misc_feature (308)..(308): n is a, c, g, or t
  misc_feature (357)..(357): n is a, c, g, or t
  misc_feature (471)..(471): n is a, c, g, or t
  Coding DNA Sequence Number=SeqID_3643
atacgtctctcgagtcgcgacgacacagcgtcacgcgcacgctcgagactgtgcgctcgttccccgtctctattcgtcacgcgtgatagatgcgccgatatacacagcggcgccactgatcgtcgatccnacatcaccgccgcgtgctgtgtgatcgtcgtgaattggaggccgctcatatcaccgccgcaggcagttcacatacggcgcgcgcaacacaccgaagtgcgcatctcttcggatcactagcgattagagagacgccgcgcacatatcacacgttcgcgcctcctttcgcccatcatcgngaataatatataatagtgcggcagtcgagcgagtatgtattgcgggcantggcggagagggaatgaaaagacgagaataactactacggcgtcaggctgcgcggatggtagcactgcgtcataatctcaaatcatctatatagtccatgcgcgtcagaatatncaggatataactactgcctcgcggcgcgtcttacgtccgccgtgcagtgagatggttattcgagcgtgcgaaggcgcgcgagcgctcgtgccgtagcaatctacctcgacatagtcc

SEQ ID NO: 13423 - DNA, 534 bp, Glycine max
  misc_feature (210)..(210): n is a, c, g, or t
  misc_feature (258)..(258): n is a, c, g, or t
  misc_feature (344)..(344): n is a, c, g, or t
  misc_feature (385)..(385): n is a, c, g, or t
  misc_feature (408)..(408): n is a, c, g, or t
  misc_feature (460)..(460): n is a, c, g, or t
  Coding DNA Sequence Number=SeqID_3644
gtgtattgtatctatcgtgcgttgtgtttgtgttgattggtggttagtctaaagatgcaagaagtggcagacatgagaagatatgagagggagtcgtgagggagttggttagttgtgtgcagtgcggtggttgggtagagtgagggggtgtggagtgacgttgagtgtgatggctgagggtgatgtatgtaaatatagataggaggaggnggtgtgcggtgacggttgatgtgggagatgtgatggtagtgtagtgtntatcgaatatagtcgcctcgtacttagtatgctgtgagagacggttcgatctatatagagagagctagaatattatgtctgtgcgnttatcatttagaatgtcgagcagtaagagtgtcagaactgntggtggagtgggtagagtgtagngtcgtgcgattgcaataagctcgtgtgcgagtgtattagttatctgcatagncttttctttgctgatatttcttttgttggtataacgaggttgcggtgtgtacaccgagataagcttagggagcg

SEQ ID NO: 13424 - DNA, 468 bp, Glycine max
  misc_feature (109)..(109): n is a, c, g, or t
  misc_feature (111)..(111): n is a, c, g, or t
  misc_feature (129)..(129): n is a, c, g, or t
  misc_feature (133)..(133): n is a, c, g, or t
  misc_feature (142)..(142): n is a, c, g, or t
  misc_feature (145)..(145): n is a, c, g, or t
  misc_feature (150)..(150): n is a, c, g, or t
  misc_feature (167)..(167): n is a, c, g, or t
  misc_feature (170)..(170): n is a, c, g, or t
  misc_feature (180)..(180): n is a, c, g, or t
  misc_feature (258)..(258): n is a, c, g, or t
  misc_feature (293)..(293): n is a, c, g, or t
  misc_feature (297)..(297): n is a, c, g, or t
  misc_feature (318)..(318): n is a, c, g, or t
  misc_feature (334)..(335): n is a, c, g, or t
  misc_feature (340)..(340): n is a, c, g, or t
  misc_feature (354)..(354): n is a, c, g, or t
  misc_feature (384)..(384): n is a, c, g, or t
  misc_feature (387)..(387): n is a, c, g, or t
  misc_feature (390)..(390): n is a, c, g, or t
  misc_feature (394)..(394): n is a, c, g, or t
  misc_feature (412)..(412): n is a, c, g, or t
  Coding DNA Sequence Number=SeqID_3645
cacgtggcggccatcctacgtacttcctagctgtgaggcctgacggtatgcggtcctttatgttgatcttatgtgctccggcgcggagaggactgatataagatacctntnctgtgagcggatactgantcanggtatctcnctntgagntagcgtgtgtcatactntcntccagcttgngtcgtcgttgtgtcgcgctatacgtgttgatgtgatacatctgtgaagttgaatgctaagccagtacgcgatgcttgntgcgtctcgcgacagacgagtagtgcgagcaacanacanccaaagcacgcggacgagagnggagaagaggcgaggnnagagntcactagcgtacgncttccgacgactcgccgcatcacatcatcnccncgncacnccgccgcgcgacgcgcancccgtgcccgtgttcgccgccggccgcacgcgcaagcaccatacatactcacaatc

SEQ ID NO: 13425 - DNA, 559 bp, Glycine max
  misc_feature (102)..(102): n is a, c, g, or t
  misc_feature (148)..(148): n is a, c, g, or t
  misc_feature (163)..(163): n is a, c, g, or t
  misc_feature (180)..(180): n is a, c, g, or t
  misc_feature (246)..(246): n is a, c, g, or t
  misc_feature (273)..(273): n is a, c, g, or t
  misc_feature (275)..(275): n is a, c, g, or t
  misc_feature (361)..(361): n is a, c, g, or t
  misc_feature (405)..(405): n is a, c, g, or t
  misc_feature (412)..(412): n is a, c, g, or t
  misc_feature (414)..(414): n is a, c, g, or t
  misc_feature (513)..(513): n is a, c, g, or t
  Coding DNA Sequence Number=SeqID_3646
tatgtgtcgcgctgtgatatgacatgagtgcggctgccacgcgcgcgctaccagtcgtactgatccggctgacaggtcagtgtgagtgagtgccgatgtggngcgtgcgcgcgctgactgtgtgcgaagagacataggacgatggccnagactgcgtacagcnagcgcacgcgcagcacntgcgagatagatgagaccgcacgctgacgtcgagaggataacagactacgcgcgccgcgctgtggntagtgacgtgatgcgacggctggtagnanatgatatacacacgcggagactaagagaaaaagtatcgtggcgcgaagagaaatagaaagatgcggtgacgaccgcacacgaaganctggcgccgccgcgctgattacgacaatgcgctccgcgaccgcnccccacnancgatcggaaagacgctcaggtacccgtgactctatgcggatgatagatctgatgacgtcacgccagcgcgcagcgcgcgtgctgcgcgcacctcggcgnacagcgcgaacgtatagaagatcgtgtgacgacagacagctcggat

SEQ ID NO: 13426 - DNA, 79 bp, Glycine max
  Coding DNA Sequence Number=SeqID_3647
attaaacctatacgataccacgcacatagtattccaaaatmtgcatagaaaatgtgtgcataatggaatctgaaaatgg

SEQ ID NO: 13427 - DNA, 259 bp, Glycine max
  Coding DNA Sequence Number=SeqID_3648
caattcctttgtcatccgctctcatccgttggaaaagggatgcccggcttggatttcccatttggggggaaaatttccacaatttaaaatgttttttgggggccactgaaaaaccccttccctgaacagaatttggggatttccagagggcgccctgggttccttgccgggtataaccctggtcaaacctcttgggtgcccattaagggtttcccttcttttttgggaaaaaaattcctcttgtggagggaaactttag

SEQ ID NO: 13428 - DNA, 541 bp, Glycine max
  misc_feature (395)..(395): n is a, c, g, or t
  Coding DNA Sequence Number=SeqID_3649
ttaacggttgcgctaattatgaaatagatagtaagcgcgtgcacgagcacacatacacacatgatgacatacgcgcggcgcgagtcatcaaagaaaatagaacaccacacgaggtgaggatcgccttatcgcgtgccatgaggtgagagtgggaggtgatccatcattgattatttgatagagatcttttaatttatatcttattctgcgtttaacttcgagtataatatgtagcttatagcggtgaggggaagagagtgagcatatatatgacttgatcattgttacatgatatgtgtcgagtatgtgttgtaagtctagatattacgacggtacatggcgggaaggcctcctccgtgtgtctattctttactaacgatacaatcaatcacctntcccacttcggcatatctatctctcacgtaagaggggtccctcgctgcctcacactttgctccctgaagaggggccgcccctccttctcttaatgtatgcagggggggggggggacacacagaataaatccaaccgacaaccataa

SEQ ID NO: 13429 - DNA, 569 bp, Glycine max
  misc_feature (216)..(216): n is a, c, g, or t
  misc_feature (232)..(232): n is a, c, g, or t
  misc_feature (253)..(253): n is a, c, g, or t
  misc_feature (269)..(269): n is a, c, g, or t
  misc_feature (324)..(324): n is a, c, g, or t
  misc_feature (333)..(333): n is a, c, g, or t
  misc_feature (338)..(339): n is a, c, g, or t
  misc_feature (348)..(348): n is a, c, g, or t
  misc_feature (364)..(364): n is a, c, g, or t
  misc_feature (401)..(401): n is a, c, g, or t
  misc_feature (408)..(408): n is a, c, g, or t
  misc_feature (416)..(416): n is a, c, g, or t
  misc_feature (459)..(459): n is a, c, g, or t
  misc_feature (485)..(485): n is a, c, g, or t
  misc_feature (502)..(502): n is a, c, g, or t
  Coding DNA Sequence Number=SeqID_3650
atgtatatacgagacgtcacacgtctagccatacacattaaatagatatgaaatccggtgagagtgatctagtcgtgcgatcgcgagtgagtatcactgagataaagtatagaatatatgcgaagatatatatagatatacacaatcactcaccgcctctatcagcatcgtcatatatcgtgtgttgcgagtgcgttgagtatctggctgagggcnggtctgctgatgtagnggtcgagtgtcgcagctagcncgcagacaactaactntcagtcgtccgatcatatcagacactatagcatactattactataacaactagcntgctacgcncgaannggatccatnctctgcatcactaccnatcgcagactctactctcgagatctctcattatatantgatagngaaggaantgagtatgagtcatagcttgacatagtgcgtatgttatgactntacagagagtatgctgtagcgcgtangatcggtgattagaaanatagtagatgcataagaaatgacatcactgagcatgactgtatgagttacgcaactcacatctctat

SEQ ID NO: 13430 - DNA, 475 bp, Glycine max
  Coding DNA Sequence Number=SeqID_3651
tcatccccaatcattgtgctggacaagggccgtcgaatctctgggctccaatcagcgcccaagatagtggcgaacgggttgacgcatagacggatactaccgatcatcctaagcgaggctctcactcagcgaagccgcattggtcactggcccagcaacgagcccaagtacttagaggcccattatcatggcgaacccccctcctacctaaccggtgaggttcccaggcatactactgctgggacactgctggtctttccgcagacccagaaaccattcgccaagaacggtgaactagaattagatccactccaggagggccatgctcggagcacttgtggctgcgtcatcccggaggtgctcgtccgcaaccgggtgaagtactgacaagctgtgtggttcgaggccggctcccagatattcacctagggagggctcgactacttgggcaagcgaaacgtgatccacgacccga

SEQ ID NO: 13431 - DNA, 531 bp, Glycine max
  misc_feature (103)..(103): n is a, c, g, or t
  misc_feature (235)..(235): n is a, c, g, or t
  misc_feature (407)..(407): n is a, c, g, or t
  Coding DNA Sequence Number=SeqID_3652
tgacagaactcaacgtaggctcacggaggcaacaggcccacaataccgcacacggctgtaatattatgtcccatagcaatacactagctcaccaatgcgtggnccaacaccaactcggcgacctgtaatagcacatccaatcagactaagctagtggtgcatgcggtgatatgactgaaatatataataaaccgcgcaccctgcagaaaataaaacaagccgcaggcgagctcgntgcacacagttgtatataattatcagactctcattcgagccgcactcgcgtcataaatatagagaaaacacattaatgagtggttaacacacctcattcgactcgagcgtggttcgttacacacagatgaatatatatagaccgtcacggtggtaggcgcgaaaattatgcnaataaacacataacacatacgctcacgcgtcttgtgtacaacgcgccgtaattactacattgagcagaattatatacgcctcgcgcgccgcgaaacaatgtgtatacaatcactctctcgcagt

SEQ ID NO: 13432 - DNA, 541 bp, Glycine max
  misc_feature (171)..(171): n is a, c, g, or t
  misc_feature (190)..(190): n is a, c, g, or t
  misc_feature (198)..(198): n is a, c, g, or t
  misc_feature (463)..(463): n is a, c, g, or t
  Coding DNA Sequence Number=SeqID_3653
aatatacgctattgcatttgtcccgtagtcgctcagtgtcgccctgcctgttccattacaattcacgaggtagctgaccgatcacgaaaataatatcgccgctgcgtcgcgaagatatagttttctcatatatctatgattcgcggttatgctcggtggtcggccgcggtnggcgcgtcgtgcggtactnaatatgantgtgagtatactacacagtcccggcgcggaatgtgcgggcgtcgtctgtgattacataagcgtactagaccaatcagtctacgtttgtgatctaggttgctgctctgtccagcgctctatattccacccactcctctctgtcgtagtacgtcgtatacggctcgcagacgatgcgtttgtcgttcggtttgtcaccctagctcacgtcactctacggaagtatgtacgtacactgattagattgctcgagcatctgtctcaccgncgcgccgccacacacaagcggcgcgcgcgagcggcggaagggcgcacagaggaatgagtgagggtgctctctctattt

SEQ ID NO: 13433 - DNA, 586 bp, Glycine max
  misc_feature (148)..(148): n is a, c, g, or t
  Coding DNA Sequence Number=SeqID_3654
ggagcaattacacgtgatgcattagatattatcttcataatcttcttacatgttccgtctgcacttttctcagaaatacattacatttccttgtgcgtcctatcaacatgcatcagcagcgcgccatccctcgtagaaggagtcgagncagcgccacagtaagtgtacgaactgcacccgtgcagtaccatcgcacaatggtagttgcgtgtgttcgaccccccgcaccgaccgccgccgctcccccctcgtctttccatgctatctctccgtctccttctacccacagagccttcagaccacctcctacacaaggataggggttacgggaatagtcctcattgaatgtcgcacgatcgagatgttcggtttagaattggtataaaaaataatattaagagatgtgtcaatgcaggaggggcgcacagtcgcggcgggtaacccctccataacagatagatactcgctatcccagcagtgtcagagagaatcattcctcatatatcatcaatgaattactacataattttccattatcgttcccaccgatacctgtacgccaacattctaccgtctgtcaactggt

SEQ ID NO: 13434 - DNA, 574 bp, Glycine max
  misc_feature (195)..(195): n is a, c, g, or t
  misc_feature (331)..(331): n is a, c, g, or t
  misc_feature (459)..(459): n is a, c, g, or t
  Coding DNA Sequence Number=SeqID_3655
tcgtgttgcgcacgcccgaataaaacaccaaaccactcacctcactcccactacatcgatatcgtcctagtcgtcgtatgggtaacgttacggccgcgcgagatatcgcccgcgcgtgccactagcacaccgataacttcgacaaaatatcgcgtcacggtacgataacccaaataagcgtatgcacaatataanggtgcactcaccacgagcgatgatgcgatactctagataattgtggcgttcgtgtacctaccactcgccactgggcaacagaagatacggagttgcgttcctatttacgtattcgtatatcacccccgaccatatncgatctcttctataacgcgtctagcgacgcagctatattgtcacccctccccctacggacgtcgctactgccacgcgatgtatatattcctagaccgcaccaccacaccacggatagaaataatacantacgctatatttgctctacactaatagcatggcaacacacagtcgacagacaataatatacttaacttgcgatcgagtgccgccgcattagtataacgcccaccgcaataattag

SEQ ID NO: 13435 - DNA, 496 bp, Glycine max
  Coding DNA Sequence Number=SeqID_3656
cggcgagcctagtgcagcagaaaaatgccggaagatcagttgaacagacacacgatcagatcacatggagctaaagtggcaaggacacatatgcatgactggttgattcttttgcttcttgctatcattgatgggatcttgaatgtgatagaaccatttcaccgctttgttggacaggggaggatgtccgacctgagataccccgttgaaagctaatactattcccttttgggctggtccgattgtagcaatattgttaccactggctgtttttctcgtttactatttcattcgtaaggatgtctatgacctccaccatgctataatgggccttctattttctgtactcattactgcggtgatgactgatgctatcaaggatgctgttggacggccaaggccagacttcttctggcgttgtttccctgatggaaaagggttaactgctcaataaacgccccattggtgcatgacatgtttaggtgtttgatccagt

SEQ ID NO: 13436 - DNA, 410 bp, Glycine max
  Coding DNA Sequence Number=SeqID_3657
gagatgtgggctttgcctattcgtccttatggtttctggactttcgagcgtcacaacgctcagcttcgttgggatcctcagatcagtcaggttgctggtcgtagggatccttacgatgatctcctcaaggaccacccttcttcttcaaactgatcaaacagtgaacgaagatgtgttgtgatgctgtctggaaggatgcgtatgtctccctttgtttcttttttgttcttcaggtgcctggaagcttggtacaaactcaaataaatactcttcaagacttttttttgtcaaaagagagagtctcgttgtttcttagtaaagctgttttgattctctatttgcatatttgatatgaatatactttctgaaatgtgataaccttccaatgttcttaaaggtttgttgctcaa

SEQ ID NO: 13437 - DNA, 533 bp, Glycine max
  Coding DNA Sequence Number=SeqID_3658
tattcttaagagaactccccacccgaaccattctcaaccccgacctacacaagtggttttagaactcatatttagaaaaagttctgttaggttcttagtagcagtcggcgacctttttctatttcctcctcactcctgggcctttatctacatacgtctcttgaatttgattgaacaaattactgcccctgtagaattaattaggcggcttaggggagagcctaacatcctgcagagacaaatcaaaagagatcgcatcccaatgccaattgtgtgttaatacagaaatgaaaagaacaaaatgccctaacatatatatgcacatcactccagaggatttgcgaattaggctttcgaaagcgcccgagtctgctgccgtatcctgcttttttattattagacaaagaaagagagtgacgatgtcatatattaggaagattcctaataatacccaatgagcggaatcagaaggggccgggttaaccataagaggcgtaatactgaccccgtcccagccaattcgaagttccaag

SEQ ID NO: 13438 - DNA, 596 bp, Glycine max
  misc_feature (36)..(36): n is a, c, g, or t
  misc_feature (45)..(45): n is a, c, g, or t
  misc_feature (54)..(54): n is a, c, g, or t
  misc_feature (108)..(109): n is a, c, g, or t
  Coding DNA Sequence Number=SeqID_3659
cggtctgcgctcctgaaagtggttttgtgttgctcnctctcctcngcgggcggngccctcccgtcgtcacggaattgttcttcttctcccactcgtttttacccgggnngcccctacttggcctgcgcttctcgcccaattagaggcgctcccccagggcgggtttgtgtactttccaccccctctccctctatttctttccccattcagggtcctttttatttttgggttcaaaaacgcactgaattaccgggggggttcttcccaaaattttaggggggacgggccttatttccaaaacggggttggggggcccccaaataaattttttttgttttttcgaacccgcccccccccctttgggggggggaaaaccaactttccgttgcgagggatccccggggaggaaggggcgagggaattggaaccattacttgagttcgcgcgctaccttgggatcccgggctgaggactgaggttgggaccccacagagaccataagtcagagggagtgctttggggataagtgaagatgatggagcgtaacgcttcgaaaaaaccggtaagggaggcaaggacgatgatgccgtaagaga

SEQ ID NO: 13439 - DNA, 425 bp, Glycine max
  misc_feature (31)..(31): n is a, c, g, or t
  Coding DNA Sequence Number=SeqID_3660
tcttctcctttaagctttccgcttaattttncataacccttacccatacttcatattacccgtatctcttcaccacctaaaaactacccattctttcaaggagagcaaagtagcattaagttttctcgttgtgcacatgacatccgtccatacgaattgatccattttctagtcattcgatggctgctgaaaaggaattcttagcaacttaacaaaaatatctacccgtaaatagaaccctacagtacaagagtcttgaaggtgtcagatcttcacacaattgactgtgagcaatcatgaaaccccacaggccatgctgtggtggtcattcatggcggtcctggagggggaacttctacaagcaatcaggaacattacttgatcctgactgttacctgaataggtctatgtgatcagcgaagtgc

SEQ ID NO: 13440 - DNA, 375 bp, Glycine max
  misc_feature (90)..(90): n is a, c, g, or t
  Coding DNA Sequence Number=SeqID_3661
tttgttcttcagtcttgagctcttttgcagatttctcgctattacgattctgtgaagatgttctcggcgcagaacaagatcaagaagganaagaatgctgctccaacggaatgcgaggagcaagttgctcaggctctgtttgatttggagaacaccaaccaggagttgaagagcgagttgaaagatctttacatcaaccaagctgttaacatggacatcgctggaaaccgcaaggctattgtgatatacgtcccattcagattgaggaaagccttccgcaagattcatccccgtctcgttagagagcttgagaagaagtttagtggaaaggatgttatctttgttgctacaagaaggatcatgcgtccaccaaag

SEQ ID NO: 13441 - DNA, 554 bp, Glycine max
  Coding DNA Sequence Number=SeqID_3662
gattatgtatcttctaagcttcttattgtatcatacactttgtatctatcatagcttgatactccttatctttgtataaatctgctaaattagccttgtcttagcgtctcttattaattatcgttaaatttgtttaactcttagcatccttattttaaatcttctatcttgtacgtgtcttaattactgtagttaaatctgcttatcttccttattggtacgcttaattattatcttgttaaaattttaagttctccaaaaattgtcattaattagtcgtggcttatcttcaaaaagttttcattttgtaaccccaaaaaaacctgtactcaagcttgagtctactttatcttaggtgacgtcagtgtggttcttcactttatagtaaaaccgatgttgatccgaaaaatcgtaagattcctattagcattgacattgagtcagtcttcgaatggctaaagtgagttccatactcaggtgtagttttatgtccttaagcaacactaggtgttgtttcctttagtaattaagtcatatctgcgaactgtgaacaa

SEQ ID NO: 13442 - DNA, 480 bp, Glycine max
  misc_feature (47)..(47): n is a, c, g, or t
  misc_feature (60)..(60): n is a, c, g, or t
  misc_feature (82)..(82): n is a, c, g, or t
  misc_feature (170)..(170): n is a, c, g, or t
  misc_feature (172)..(172): n is a, c, g, or t
  misc_feature (199)..(200): n is a, c, g, or t
  misc_feature (211)..(211): n is a, c, g, or t
  misc_feature (328)..(328): n is a, c, g, or t
  misc_feature (350)..(350): n is a, c, g, or t
  misc_feature (368)..(368): n is a, c, g, or t
  misc_feature (373)..(373): n is a, c, g, or t
  misc_feature (391)..(391): n is a, c, g, or t
  misc_feature (442)..(442): n is a, c, g, or t
  misc_feature (455)..(455): n is a, c, g, or t
  Coding DNA Sequence Number=SeqID_3663
attcgcaaggagattgcatatgctccgtactacctactcctcacatntctctcatactcntctcctctgtctgcgactctcnccagctgtaatgacacaatcatgtattggcacatgtgcacggatcgaacagcagaatagacgtcagaccagtgagagtagtcgtgacntnatgtaatctatagagtgtcttgtttgnntagtatgatgntgtatatgtgtcgagatacgatatcagtcgagagcgtggtgtacatactccgactatatgtagtggtcgtatataatgtagtactgtgatgaagtggagcaagataagatgatggangaatcacacacactacactaancgcgacgctctcatggtnattanattggtggaggagcgagngggcggcgagccgcctcgccagacgcatcagtcataccacctctagaggangggtggtgtctcntgttgctcgctcctactggagttag

SEQ ID NO: 13443 - DNA, 423 bp, Glycine max
  Coding DNA Sequence Number=SeqID_3664
aattgcacgagattttaaccaccgaaaactccaaggtcaaaactgctaaagttgaagcttatgatgaaaagaagcttgctgaagaatatggcattgaaggataccccaacatcaaattattcatcaagggccaacccgtcgactaccacggcctcagagtcgctgaaaatatccacgagtttgttgaaagacagttgaagtccccattgactgaagtcaatgatccccaagtgattgaaaacaagctcaaggcaatacgaatggattgtagttttgatcggtcaagaagccaatcaagctcttcttgacgttgctgctgaacaaggagacgtcttattccttcgcactactcaagattctatcaagggcaagtatggcaacccttctaacggtcaaatggtccttgttaacaatatcactcat

SEQ ID NO: 13444 - DNA, 348 bp, Glycine max
  misc_feature (182)..(182): n is a, c, g, or t
  Coding DNA Sequence Number=SeqID_3665
tgctcaaggttttatctgcaaaagtgttaaaaaggaactcaaaatatagtggagaagtgtgaaaccatggtggtccatttcagtgttattcatacattatatacgtgtgctttaaacattaatatgctttaaagtttttataacccaaaaaaaaaaaaaaaaaaaaaaaaaaaaaaaaaaangaaaagtgtgcgtatattttcttttttttagtctgttgctgcatcactttaatttgatgaaaatgcttttgtttctggacatcaagctatggattaggccatctgttttacctttagcaactatggtctaactaaaggcaataataatgactaaatggttggtggg

SEQ ID NO: 13445 - DNA, 496 bp, Glycine max
  misc_feature (70)..(70): n is a, c, g, or t
  misc_feature (169)..(169): n is a, c, g, or t
  misc_feature (205)..(205): n is a, c, g, or t
  Coding DNA Sequence Number=SeqID_3666
tatctcgtgacaacacacgcgacagcgtggggtggttgggcccgacacacccaggaggctacacctgtantggcgagtaggcaatctcccaccatcacataatactactgtcatctcaccttttctctatatagcatactcatttatatcttcctctcttgagcactcntatagcagatcgctcagttcggctgtgcatgtcatngcggtgctagtgtctgattaccacttgcttgtctctgtctcttttctgtgcgctggcgatatccgctactcttcgttcctcttgactctatcactcgactcacgttctcatgtcatctcctctctctcacactctcacccgcgcccgtgacatctcctcacgctggcgctcccgagagtagagaagacacacgggtcggcgcgtccctatccgcacacacgcgcggaaggaagagaaatatagaagagaagagaggctgttatctcggataatcccatactggtgccttat

SEQ ID NO: 13446 - DNA, 464 bp, Glycine max
  Coding DNA Sequence Number=SeqID_3667
tggacacaatagtctttcgccctattcaagccaagcttcgtaacaataaggatatcatcaaaaagatggatccctactgtaagtttacgcttggagatcaaagcgctagttcctatgtcgctgaagctatgggatgttatccttactggaacgatgaaatttcactagagagaaaacatgatgagcatgctgcgaaaattgtgttgaaagataaggacatgttgtatgatgatactattggagaagcaaatattgaccttgacaatgttattttaaatgggaagatgaatcaatggtacaatattgagcagggtggagaggtaactggtgaagttttggtacagattgagcgtaaatctaaatagatgagatatatattgttatgtttttaacttgtttataaattatactttttggagacaatgtctttgttgctctttattgtgttgttcagagtcgctttg

SEQ ID NO: 13447 - DNA, 101 bp, Glycine max
  Coding DNA Sequence Number=SeqID_3668
caggatccatggtcgcaggatattatctgttttccgtgctaacttttaaaattgacattcatgacactttcacatggtaagcatggtgttatatcctcata

SEQ ID NO: 13448 - DNA, 558 bp, Glycine max
  misc_feature (87)..(87): n is a, c, g, or t
  misc_feature (223)..(224): n is a, c, g, or t
  Coding DNA Sequence Number=SeqID_3669
gaccagggtgttaaatattggctccgtcgaaatagaaaaacatgaaaaacttttgacatgttgagtgagaaagattgaaaaggtgcncgagaacaggttctttgtggacgatgtgccaatcacggtgttcaagaacagcaaggacttgggagtgaaattccccttcgaccagccaatgaagatctacaacagtctatggaacgctgatgactggccccaaggnngtggtttgtagacaacggattgttcctaagccccattcataccaggctacaaggggttccacgtcgacgtctgcaagctctcgaccgaccccctggactccgaaacccaacccctgagcagtgccctcctaccaaacccccagccccaaacgctcccctctgacgcaaccacctcttcctctccccacattcttccctcctcccccttctctcccgaccctacatctctcccctccaaccccaccccatacacgcctcccataccgcctcctctcaactctttccacctcaccttctcaccaccttatcgttttataccttatccatctcccac

SEQ ID NO: 13449 - DNA, 538 bp, Glycine max
  misc_feature (62)..(62): n is a, c, g, or t
  misc_feature (87)..(87): n is a, c, g, or t
  misc_feature (172)..(172): n is a, c, g, or t
  misc_feature (213)..(213): n is a, c, g, or t
  misc_feature (274)..(274): n is a, c, g, or t
  misc_feature (339)..(339): n is a, c, g, or t
  misc_feature (487)..(487): n is a, c, g, or t
  misc_feature (499)..(499): n is a, c, g, or t
  Coding DNA Sequence Number=SeqID_3670
cgagactgaacgtaaagcagcatcagaaaagagtgagacgtaaaattcttcagtgctttctnatacgcacgtgtcgctgtcaattcnctgtccatatagaaaattataacgatataaagaacgacataagacatttatatatgctctatttatattattatataatcacgancaacaatatcaacacacggatagtggggcgaagagagcggnggatgagcgaggaaagagagaaaggagtacgagaggacgggacgcgagagatcgtcaacgngagagagatatagagagacgagggtggtaggtgtgtatctggagtatattgagcttaatgtgaanggtatgaaataattaactgatatgacgaattgacgtacaattggtggtttagtagaagggttgatattacaacgaaagtcagtccacgccgtctcctctccgctcgcacccgcgccgccgcgcgcctcggccaccactcacggtcgcntccaaccgccgncgcccccaccacgcgtgtcgcgttatacctccgaccctt

SEQ ID NO: 13450 - DNA, 519 bp, Glycine max
  misc_feature (349)..(349): n is a, c, g, or t
  misc_feature (393)..(393): n is a, c, g, or t
  Coding DNA Sequence Number=SeqID_3671
tttatctcgctgtgtggaccttatgctgttactggtagtaggtggttgtggcccgctggggataagcatggtatgtgggacacccgcggtggcatatgcgaggatggtgtgggatatgagggcgttcggcgcgccgcaccacggacaccccgcaggcttaatgggtgccgaagcgacaccgccgagtctgcgcgcgcatcttcggcctgcgcgaaccggcgaaaactaggtacaaaggcgcacgtcgtcatacactcgcacgtcgtgtacaacgcacataaacacggaaaggacaatcaggtgaaaagcgtacgaacatcgcaatactactccgttcaatatggtgaantcgtggtcggctctggcgctgacaaggacgacaggctgtatggntatcaattattgacacacgtgtgtgggcgggacgcatggatgcaggtggcgggcctggtgatatatacttgtaacaacactctgttaccgtgatacgtggcggcgagtcgcgggaattattaatag

SEQ ID NO: 13451 - DNA, 593 bp, Glycine max
  Coding DNA Sequence Number=SeqID_3672
taatcattgcccctttcaaactgcaagcaaaaatccatcccttgttgcccccatagtgaagtgtccttcttctttaaggtctgtgaagagcgtttccagatctttcggcttgaagtcggcctcttcctttaaagtccctgccatggcttttttcaaggttaagctgattggcccagatggaacaaagaacgagtttgaagcccctgccgatactttcattttaaatccaccaaaaagggctggagttgaacttccttactcatgccgaggtggagcatgctccccctgtgctgggaaaattgtttttggttttgtgggccagtccgatggctcattcctcgatggcaacccactgaaggaaggctttgtttttacctgggtttcctatccaactgcagactgtgttatttaaactcccaaggaaggggattttttttgagcaatgctggccttgaagttgggaactgggaatttaaggtagactttgcaactagttttcttgggctgctttaaaaacaaatttttttttttgattattagtgatttggggtattgaatttttgtttgtgcagcaagccctgttttttaattaa

SEQ ID NO: 13452 - DNA, 523 bp, Glycine max
  Coding DNA Sequence Number=SeqID_3673
tgccttctgatctgcctactgatgccattggtgatgaaaagcgacttacacaaactctgttgaatgccgtgggtagtgctggcaaattgactaaggagggctatggtactataagagtatcggttgctaaaccaaaatctatacaggatcggcgacctccacagttgaatacagcatctattgatgaccattcctacatactagtccaattaaaggactctggatgtggcatttccccacaagaaatctcgcatctctttaccaaatttgtccaaactctgaatgaaccatctctacctagcagaggtacatgtcttgggcttgccattcttgaaatattactagacctcatcgaacgccacatatctatctagactgatggtcctaacaaatgaatcacacgtacatatatgatcaaacttcagattttgaactatccatatccatacgatcatcaagctacagacagaagccaaccatacagagaacatgttctgctatctagatgtataccgctgatcat

SEQ ID NO: 13453 - DNA, 586 bp, Glycine max
  misc_feature (98)..(98): n is a, c, g, or t
  misc_feature (149)..(149): n is a, c, g, or t
  misc_feature (250)..(250): n is a, c, g, or t
  misc_feature (287)..(287): n is a, c, g, or t
  misc_feature (336)..(336): n is a, c, g, or t
  misc_feature (393)..(393): n is a, c, g, or t
  misc_feature (449)..(449): n is a, c, g, or t
  misc_feature (491)..(491): n is a, c, g, or t
  Coding DNA Sequence Number=SeqID_3674
gtcgtaatgctatctggctgctattcctctcgtcgttctctcgatgtgatgactctctacgctgtggtccatgtatctactgcgcacatacgcatacngcgagcgatgcacgtcgtcggtcgagcgctagctctcatactacgacgccnacgaggcgcgctacgtgtatggtgggtagaatttgttatatctcatcctctgctgttctgctagcacgtgacgactggtctacacgcgtcatacgctacanctgcatataacgtctgtgtgttggtcgctgctgatantcaatgaatcactcaccatcataatctgtgtgttcggatgtcatatatnacatacttgcgtcgcaggtgttgtatgggtctgactgcaatctacgtctctctgttngtcgtcctcgattacgttgctactctgtactcttattgatggtgtatatgtatggngtcatggtgatggtacgcgtgatactagtgctgatgccacanctgtccgtctcacatctctaccatcaactcattaataccacacacgatcgtacacacatggcgcttcatcttactacagcgctcgtcgacgtgtg

SEQ ID NO: 13454 - DNA, 487 bp, Glycine max
  misc_feature (71)..(71): n is a, c, g, or t
  misc_feature (399)..(399): n is a, c, g, or t
  Coding DNA Sequence Number=SeqID_3675
attagctctatctctaagggaatgagattcggagaggacgcatagatgagtactattcgacaaaccgtgcnttgttcttttcctccttccgctattcttggattgtgtatagggatatgaggtaatatatacgaagatttctatatcgtcctgatgaatactctgtatgtctcttgtgatgtactagcactaatatcccagtatgtagaggagagtgctgtagaccgcgccgtagaggcagataagacatgtgagctatctgatagtggattcttgactcgagtgatgagaagagttagagtgacgcctctacacactgcttcaatatctcgactctaggcatgtatgactatgtttatatgatacgttattattgtataagcttatatacaatatatnaagataattataatataaggatggttcttcctgtctactctcccgaggcggaggtatcatccatcttgttctagtatggacgaggcgc

SEQ ID NO: 13455 - DNA, 549 bp, Glycine max
  misc_feature (191)..(191): n is a, c, g, or t
  misc_feature (270)..(270): n is a, c, g, or t
  misc_feature (300)..(300): n is a, c, g, or t
  Coding DNA Sequence Number=SeqID_3676
aattatttgttttcacacgtgtgcctcgattataggtgggacggtcctctcggggcgtcttcattatgttctgccgcggcgcctgttgtggtgagtgtggggatcgcaacacccccacccaggcttctcgtgaaatgtccctaccactcagcggctgatggtattattgtttatgtgtttagatgcaccanctcgtctctcctcttccagacccacaccgggtgggggggtggtgggttgtgggttgtatagcggtgagtctgtgtgttntgccgcgccatggatgagggtgtgaaggtncaagacgagttcatcatcgatattatctcttgtcttgtgcatgtcatgttctttgcttattttatgctatgttgagttgagtgtatgtgcttgtcgtggtttggtccgttttgtggcccacccacatcattatgcgccggtgttatgtgggtgggtgtattcttcttgtgcgtgttgtgtggttgttattctcatcctcattatcaattctgtatcctcacattacttttgttatgctcatgtcggcgg

SEQ ID NO: 13456 - DNA, 568 bp, Glycine max
  Coding DNA Sequence Number=SeqID_3677
aaatccagcggcaacgacaaggacaaagacaagaagaaacccactactcgctcttctcgtgctggtcttcagtttccagtcgggagagtccacagactgttgaaaggaaggtcaaccgctcacggacgcgttggcgcaaccgcagcggtttacacagccgctattttggagtatctaaccgcggaagtcctcgagctcgctggcaacgccagcaaggatctgaaagtgaagcgtatcacgccgaggcatctgcagctcgctattcgcggtgatgaagagcttgatactctcatcaaaggaactattgctggtggtggtgtcattcctcacatccacaagtctctcatcaacaaatctggccaagagtagcttttgtctctgtctctcgaacctttttgcttaaatataatcgtttgtgtgttaagacattagtagagagaaaactcttgggagattgtttgttttgttaaagactcacgtgtgacttgtttgttggctcttgtttctgaaataatgttttggtgtttgttcatataagagacagttgcataagttgtctatttttcct

SEQ ID NO: 13457 - DNA, 516 bp, Glycine max
  Coding DNA Sequence Number=SeqID_3678
gagcaccagaaaagtatattccggaacaaaagacttaccaaagaggaaaaggcagtcaggaaagaagtatgatgagtattgaagaagatcttgataaaaagagtgtgagaagtgatgacttgaataaaagtaaagatatgctaatatttggaaatgatgcaatgcttaatgatatcctcggctctcggagaagattgagaagaataacaacacctaaaaagttgacacatgctcaacatgttatgcaactggtggaggcttctggtaattcaactcataaaattccgcctcgaactcaagctcgtaaagagacccttgaagagattctaataagaaatagagtcgatgaagctgacatgaaagtcttgaaacgaactctaaaagatgttctctatcaaccagcaaaccttagagaatctcaagatatcttggaatcttcatttacaaacaataataataatgcaagtgtcacaaaagtcactcaaaaatagttttctcagaactacttttttgtat

SEQ ID NO: 13458 - DNA, 333 bp, Glycine max
  Coding DNA Sequence Number=SeqID_3679
agatatctgttgctctatccccagcatctgatgtagagtactgactgtggagtacaggaatatatacttcactgtgtgggatgtcaatggccaggacaggatccgtccactgtagcggcattattcccaaaacacttagggcttcattacttgggctgatagtatcatatcacatcatgtggtggaggcaccggatgatatgctcacaatgctgggtgtggatgaacttagagaggctgtcttgcttggttctcccatgcatcttgagctttcgagtgctaagactgccgcataaatatctgatatgcttgtactaccttcgcaccgacaacg

SEQ ID NO: 13459 - DNA, 412 bp, Glycine max
  Coding DNA Sequence Number=SeqID_3680
tgtttaatccgtcttacatctgcgacgaacaaaaatccctgatttcgcgttgtttgcatcaccttgagaaggctcagcgatgaggaagctcaagaaccatgagaagaaggttctgaagaaagtaaatttcctggaatggaaaagagaaggcggccatcgcgaaaccctgatcacgggtcgttaccacatgggtggtcgtgacgactacaaaaaatattcaggattgtgtaggatggtgcagaagctgacgaacgtgttgaaacagatggatgcgactgatccttttaggattcagatgactgatatgctcctcgagaagctatacaacatgggagttataccgacaaggaaaagcttggctttaactgatcggttatcagtttcctccttctgcaggcgtaggttatcgact

SEQ ID NO: 13460 - DNA, 162 bp, Glycine max
  misc_feature (44)..(44): n is a, c, g, or t
  misc_feature (47)..(47): n is a, c, g, or t
  misc_feature (50)..(50): n is a, c, g, or t
  misc_feature (58)..(58): n is a, c, g, or t
  misc_feature (102)..(102): n is a, c, g, or t
  misc_feature (106)..(106): n is a, c, g, or t
  misc_feature (108)..(108): n is a, c, g, or t
  misc_feature (114)..(114): n is a, c, g, or t
  misc_feature (118)..(118): n is a, c, g, or t
  Coding DNA Sequence Number=SeqID_3681
tgtgtggatagttgtagagtgcataacgcgatgagtgtgatatnaanatnatgtatcntactatacgcatagagtatcatctctgcttagcgatcctgtgangtgntntgacancaanggtgctcatctttgctaagctgctagcgagacgcgagtcatagt

SEQ ID NO: 13461 - DNA, 585 bp, Glycine max
  misc_feature (27)..(27): n is a, c, g, or t
  misc_feature (115)..(115): n is a, c, g, or t
  misc_feature (143)..(143): n is a, c, g, or t
  misc_feature (152)..(152): n is a, c, g, or t
  misc_feature (213)..(213): n is a, c, g, or t
  misc_feature (221)..(222): n is a, c, g, or t
  misc_feature (224)..(224): n is a, c, g, or t
  misc_feature (233)..(233): n is a, c, g, or t
  misc_feature (351)..(351): n is a, c, g, or t
  misc_feature (390)..(390): n is a, c, g, or t
  misc_feature (412)..(412): n is a, c, g, or t
  misc_feature (415)..(415): n is a, c, g, or t
  misc_feature (417)..(417): n is a, c, g, or t
  misc_feature (449)..(449): n is a, c, g, or t
  misc_feature (457)..(457): n is a, c, g, or t
  misc_feature (463)..(463): n is a, c, g, or t
  misc_feature (470)..(470): n is a, c, g, or t
  misc_feature (482)..(482): n is a, c, g, or t
  misc_feature (487)..(487): n is a, c, g, or t
  misc_feature (504)..(505): n is a, c, g, or t
  misc_feature (542)..(543): n is a, c, g, or t
  misc_feature (550)..(550): n is a, c, g, or t
  misc_feature (556)..(556): n is a, c, g, or t
  Coding DNA Sequence Number=SeqID_3682
tgcggtagcacgcacggcacactacanactagagcagcaatatatcgtgcgagctgcggtggtggtgacagacatcatgtttgtctgcgtagtctctgcggcgatacgagcatcngtcggcgattcttctgatgtctgtctcntgacatcanagacatatacgagcaaatcacaggcgcggatagagctacgcgagagtgtaaatgagattanaaaaaaannancacactatnccccacaccctgtcaccaaacacgggagagggagaggatgtgtcgttctctttcttttctctcctctttcctactatcatctcctacttgcactgtcctgcgcgccccgctgttctcntcactcacctgactcacatctaaacgacactcagcagancgctacccgacgttgcctgcgncgncnttgcatatagttatgagtgtcgtagagtggangagaaggncgtagngcgggancggggcgagcgncaccngggttgtgggggtggtnnggtgagagaccgtcacctcctgtgtcgcaactctctnnactcatnatattntcctttctgcgcgactggctacgcgtcta

SEQ ID NO: 13462 - DNA, 431 bp, Glycine max
  misc_feature (145)..(145): n is a, c, g, or t
  misc_feature (156)..(156): n is a, c, g, or t
  misc_feature (164)..(164): n is a, c, g, or t
  misc_feature (190)..(190): n is a, c, g, or t
  misc_feature (341)..(341): n is a, c, g, or t
  misc_feature (355)..(355): n is a, c, g, or t
  misc_feature (366)..(366): n is a, c, g, or t
  misc_feature (380)..(380): n is a, c, g, or t
  misc_feature (391)..(391): n is a, c, g, or t
  misc_feature (406)..(406): n is a, c, g, or t
  Coding DNA Sequence Number=SeqID_3683
gtgaccattttttcattcaacttgttgccaccacgaacaaaacaacaattccaactcaaaatggttttcaaagtagtttgcctcgttttggccgtagccgccattgccaacgcttccgtgttctcaaaatgcgatcaagacccanaagcagtttcngtaggtcntcgaaaattgcaacgataattactgngaagtgaaacgcagtactccagccaaaatggaattcacctttaaaacaaccaaagaagcaactgatttgagtggcgcaatcagtgcacaaatcgccggaaaatggattccatggccattggcgctgcttcaaaggggtgcaacaatttgantaaaggcgaatgcncagttgctgtntcagtgaggccacntaccgtgttancattaaaaatcccantcgttgaccaatcggaccagaactg

SEQ ID NO: 13463 - DNA, 463 bp, Glycine max
  misc_feature (54)..(54): n is a, c, g, or t
  misc_feature (65)..(65): n is a, c, g, or t
  misc_feature (92)..(92): n is a, c, g, or t
  misc_feature (162)..(162): n is a, c, g, or t
  misc_feature (184)..(184): n is a, c, g, or t
  misc_feature (268)..(268): n is a, c, g, or t
  misc_feature (314)..(314): n is a, c, g, or t
  misc_feature (335)..(335): n is a, c, g, or t
  misc_feature (424)..(424): n is a, c, g, or t
  misc_feature (434)..(434): n is a, c, g, or t
  Coding DNA Sequence Number=SeqID_3684
tcacgtcgaggcgatgttgcgagatagacacatagcacagcgtatacataggcnagtcgatagcngacgatcaagcgcgccgatgcagctgngtgagcgcgtacatatcagcatagagatgacaagacgcgacacgtacattcatcgagtcgttgtacatcnaatcatatagcgatcgtcgagnggtctacggcgatagatgcgtacgtggtcgcagaggcacataacgcgccgacacactacgacggagacgaacgagagatgagancgtgatggacagaaacacgcaccacggacgtactctgtagacatgncgttagatatattacgagtancatctaatatatataaccacgagacgacaacaagactcggatgtaagcatatattcaagctaccacacaccaactatcacatacactcnagagtagctncatcatactgagaactcatgctcacgcgc

SEQ ID NO: 13464 - DNA, 339 bp, Glycine max
  Coding DNA Sequence Number=SeqID_3685
gcagcaatttcctgagctagagcctgatgaactgcgcttcccgtgtctcactcaacctgcgcccatgggattggcttaacttctggggacgtactccatccactacggcaactccccccctgcactgcagtttatctcggtaagtacgcgcttcgtatctaattactgcagtttatcaggtgtctctctaaacaagaggtctcaggttttgtctccttgtgttttctggttgtctaggcgggtatgacgtggaggagaaggccgcgagggcatatgacctggcggcgctcaagtactgggggacgtccacgcacgtgaatttcccggtggaggactaca

SEQ ID NO: 13465 - DNA, 376 bp, Glycine max
  misc_feature (215)..(219): n is a, c, g, or t
  Coding DNA Sequence Number=SeqID_3686
attcgtgaacgattgccaactcattaacagggaatccataaaccaaggctttctccacaagccgaagcacaaggcgcaggacctccgcattccaaaggccgtcaaccaagctctccggtccggcgcggaggtgctgacggtcaagaagttttacgcctctgaacgagaggaagctggagtaggggacgaagccggcggcgctgaagcgcgtgtcnnnnnaggtgcgccacgcgattcagaaggcgcgtctggagaagaagatgagccaggctgagctggcgaaacagatcaacgagcgaacgcaggtggtgcaggagtacgagaacggcaaagccctacccaaccaggccgtgctcgccaaaatggagagggtcct

SEQ ID NO: 13466 - DNA, 510 bp, Glycine max
  misc_feature (380)..(380): n is a, c, g, or t
  Coding DNA Sequence Number=SeqID_3687
agcccgtcggcgagaggtttatgtagattgtcggatgatataatatatgtggatgcgtgtgatggtgctgcttctccccgccttacccgccggtctcactgcgcgcggcgcgacataaaaatctgtcacatgcaaacacaaggagtggcggcgactcgtgtgggaaaactacagattgtgtagataatattatgtaattaatacactatcaggctctattaatatattcttttcttcaagagttcgtgaggcttggcaaaacacctaccgctacatggcgtaaatgattcttttcaacaatagttaactaatgataatgaatagggaacgagggggaggcctgacagcctggatgtctctgctagacaacccaaacggangagtagaggtgagatactctgttttttgttcttttcttagtaggaggcggccctctcctcccccctcttcttatacgttgtgttttagaggtgagatgccccccctaacctaactacaccagactgcttc

SEQ ID NO: 13467 - DNA, 434 bp, Glycine max
  Coding DNA Sequence Number=SeqID_3688
gaatgtcatcttgattgctgcaacaacattaattatttctgggtttagtgaagttgcatcagcagctgaacaaaaagtaccaaagaaacaagtagtcgaagcaaaaactgatttatcagcacaaattcaatcatttaagactgctaatcaggttggacaagttcatgctttaggtaatattaattcttcagaatatgctgcaagggttactctcaatttaagccaggttagaaaaatgacatctgctcagcgtaatatttatgataagggctttaataaaaaagattacagtaagctaaaagatgcactaggaacaagtgcaactgtacttgggttggtatttgtaactagtacacctgcaggagtagttgctggagtgtctggtttgctaactactttagctcctagtgctcgtggcactctcaaaaatcttg

SEQ ID NO: 13468 - DNA, 229 bp, Glycine max
  Coding DNA Sequence Number=SeqID_3689
gatgaattacgctgcagtcctcggcgattatctgaacatgctctcagatatatttccacgcaacgtgcttccaccacacaaatcgtcgtgtgtaccagagtgttatttatacagcccacaatctgattactctacgtctacaccggcactaacagcacattttacataactaattctcgggctcctttacgagctctacagcgacacaagacatgtacaaaacgtttcg

SEQ ID NO: 13469 - DNA, 159 bp, Glycine max
  Coding DNA Sequence Number=SeqID_3690
cttttgcatgaaatcccggtcttgcagttggaggagcatgtatttacagagtcaaataagttgatgaaatccattcaagtggttttgaattgtcttaatgaacttcgtattcgtcatgttatggaaagattttcatttacaactgatacaaggaagcaa

SEQ ID NO: 13470 - DNA, 569 bp, Glycine max
  misc_feature (44)..(44): n is a, c, g, or t
  misc_feature (145)..(145): n is a, c, g, or t
  misc_feature (170)..(170): n is a, c, g, or t
  misc_feature (182)..(182): n is a, c, g, or t
  misc_feature (221)..(221): n is a, c, g, or t
  misc_feature (258)..(258): n is a, c, g, or t
  misc_feature (287)..(287): n is a, c, g, or t
  misc_feature (299)..(299): n is a, c, g, or t
  misc_feature (319)..(319): n is a, c, g, or t
  misc_feature (369)..(369): n is a, c, g, or t
  misc_feature (422)..(422): n is a, c, g, or t
  misc_feature (424)..(424): n is a, c, g, or t
  misc_feature (463)..(463): n is a, c, g, or t
  misc_feature (465)..(465): n is a, c, g, or t
  misc_feature (479)..(479): n is a, c, g, or t
  misc_feature (497)..(497): n is a, c, g, or t
  misc_feature (530)..(530): n is a, c, g, or t
  misc_feature (542)..(542): n is a, c, g, or t
  misc_feature (544)..(544): n is a, c, g, or t
  Coding DNA Sequence Number=SeqID_3691
cagacagtgcgatcatggatgtatcgatcacgcgtacggcacgngtcgacacgtcgatatcgtcgacagtgcgaggtctcgtcgcgcggactacgcacgagtatgtgtgaatgcgcacacgacactatgtgacgtctaagacgcntctgtgtccgtcgtagctgcgctgncccatgacggantactgcgcgctctactatcacaacaccgatgacgtcatngatcttagcggctatctaagagctatgcgcgatccgngcatgtattagcatggtatatgtatctgncaacgcgtccgntatacgactcgcgctacagncgatacttcagtgttctcgcacagcggcgcactcatacgtcgtctgatanatagagcgtgtcatgctcgtctcgtcagtgcacgctggatctctgttgacggntngcatactgtctgctgctgaacggtacagtgagacgactngnagcatcagcgtcgnacgggatgtagagacgantcgtcgactatgtatctgcgagtcgcacgcgcnacgacgtctgcnanacctattgcttactctcgagtgtgt

SEQ ID NO: 13471 - DNA, 456 bp, Glycine max
  Coding DNA Sequence Number=SeqID_3692
attaatactaccaatgactcccaacaaactaataaagatgaacttattgtgaattctatacagaagacgatagagatattagaagagattgagagagaaatcgatcagagtgaaaataaaggagcctccaatgaagaagttgccaatcttattgagtctttgatgaagaattctcccaccaattctgctaacaagactgatttattaagtcctactgatgaagacttgaaacctatcaattggaatgatgagagttcaatagagaatagagatgtcagcgatttagatagctctaagttggatacatcaaagatcgatggtgatgagatgcaattacaattccaatcgttaagtgaggatgataaagttgctgatttacaagctttggtcatgaatcaaagaaagactattactaatcttactaaattgaatgctgaacttactcaaattaaccag

SEQ ID NO: 13472 - DNA, 570 bp, Glycine max
  Coding DNA Sequence Number=SeqID_3693
acgatgctcatcactcagaatactgactatgaacttgacccaatcactgaacgatgctatgaaaaacaactgaaaggactgtgatgccaaatgaacagacagatgaccttcccatcctttgccaacatctagtcatcaatttgatatacatgaatgagaatatcacattgacatctctaatgatggcagatgccgtatatgatgctttgcaatgagatcatcatcatcatcaaactcaacacccagtatgccgaatcttgatgatagtgtatttcacatctgccaagacctctgtgagatgaactcatcctctcctgactgctgccccggctgctatgacgaagctaccaccactatatgcgactgtgaatgatctatgcgcacaccgatctcgaattactggccaagctatatgatctacgacacatgcaagctctcctctatgatatcaggcactctcgactaactgatcatgttgacgctcatctgccccatatatctcaactgcgaacttatgcgaggcttgatcgactcatgcacatgagatgatgctggtcgtcaatacctcga

SEQ ID NO: 13473 - DNA, 241 bp, Glycine max
  Coding DNA Sequence Number=SeqID_3694
aaatggagtctatggacacttcaaaactagcttttatattgcctataaacttcccattttttataaaggttattctttgggattcgctactggaagagataaagttaactttaacaatggcttaactgaatttggtgtgtggcagcgtataaaattacaaaaagaaagttatacatttcaactgagtcatactttgagggagaaatttatttggctcaaaagtctcttcccaatacccaat

SEQ ID NO: 13474 - DNA, 561 bp, Glycine max
  misc_feature (144)..(144): n is a, c, g, or t
  misc_feature (191)..(191): n is a, c, g, or t
  misc_feature (193)..(194): n is a, c, g, or t
  misc_feature (197)..(197): n is a, c, g, or t
  misc_feature (205)..(205): n is a, c, g, or t
  misc_feature (208)..(208): n is a, c, g, or t
  misc_feature (223)..(223): n is a, c, g, or t
  misc_feature (254)..(254): n is a, c, g, or t
  misc_feature (273)..(273): n is a, c, g, or t
  misc_feature (435)..(435): n is a, c, g, or t
  misc_feature (464)..(464): n is a, c, g, or t
  misc_feature (476)..(477): n is a, c, g, or t
  misc_feature (483)..(483): n is a, c, g, or t
  Coding DNA Sequence Number=SeqID_3695
gcagcacgtagagatagcgcggacagagtgcactagagtgagcgattctgttcggcccactgctcagggagtgcagtcgttcggcgcacgcgacgaatcgtcacatactatatgatagtcagtgtgcgtaatatatatgtgaangaggagagagtgatgcgagatgcactgctgacacagccaaaaacgananngcncacacctnttncctctgcgggttacngtccttccgcgcgcctccgcgccttgacatngggtgcgcgcgggccgcgngccgacgtcgcaggacaccgccgagagcggccgaacgcacgacacgcaccgagaggtagagaagtgagcacgcaaccaccatcagtcagcgtgtcgctccgtctgggcggcgcgtcggtagagtgagtagtatcactcctacactcgtatctgtgatatacnactgacgacccgctcctctctctctctcntagacggctgtnntttacncctcttcctagtggagaatggagagagcgatgagcacgtctcctacgcgccgcgtgccgcgcgttagcactcactgcg

SEQ ID NO: 13475 - DNA, 557 bp, Glycine max
  misc_feature (212)..(212): n is a, c, g, or t
  misc_feature (230)..(230): n is a, c, g, or t
  misc_feature (281)..(282): n is a, c, g, or t
  misc_feature (293)..(293): n is a, c, g, or t
  misc_feature (301)..(301): n is a, c, g, or t
  misc_feature (356)..(356): n is a, c, g, or t
  misc_feature (418)..(418): n is a, c, g, or t
  misc_feature (447)..(448): n is a, c, g, or t
  misc_feature (450)..(450): n is a, c, g, or t
  misc_feature (454)..(454): n is a, c, g, or t
  misc_feature (458)..(458): n is a, c, g, or t
  misc_feature (460)..(460): n is a, c, g, or t
  misc_feature (462)..(462): n is a, c, g, or t
  misc_feature (481)..(482): n is a, c, g, or t
  misc_feature (527)..(527): n is a, c, g, or t
  Coding DNA Sequence Number=SeqID_3696
gtgacgtcgatctcatcactccgcgcatcgctcccatccacttatccactctacatcaatgcacactacatcatttcacatcagacgactcactctactcaactcctgactcacagatcgcatagcgtcgggccgtcaggacgcaggcaggacgcacagtgtcataagtactgggcagagtgtgcggtgagtgctgtcatcgtgcgcgcgcntgcacacagcgcacatangcgtgacgttaggcgcagctgtacatcacagcgtgacgagcacgtgcgcgnngagaagcaggngcagcgangacaagagtggaagcggcgctagcggtagagatactcgaggcgatcgtcatcagnagcgcagcggcgcgcgcaggacgcacgtactgcatgtcggaacaaccacgcggcaggctatngattgccttgtataaccctatatgtttgnntnggcntgtntntntgcgccacatgaatagatnnctcgatgcactcactactctccatacataccacactcgtcgccgngcctacactgtgtctggtgtatgtatcgtc

SEQ ID NO: 13476 - DNA, 139 bp, Glycine max
  Coding DNA Sequence Number=SeqID_3697
cgacgtctccgctcttgatgccgaacgcttatttaccaaacttatttaaaaacaggccgatccgcaagctcaagatccggttgcgcacgacaacggctagtcctacatgtgtattcagcacagcaacgtttaccttatg

SEQ ID NO: 13477 - DNA, 359 bp, Glycine max
  Coding DNA Sequence Number=SeqID_3698
aaacctactctgcttcgtcaatcaaacacacagcacaaccaaaaccaagaagacccccgctttctccgcgtccgcttctcccacgccaacccatcaccagccatccgtcgatgcaaccggcgcagcctccgtgtggcagccggagaggagggagaggagccccgtcgcgggcggcgacactcccacgctgcaaccaccatcggctgctcgtgctcgtcgtcatcgtgtacctgctgggcggcagcgacgttcttcttctagccgccgcggcgcctgtccgccgtctgggagcagaggcatccgtggcgtacgacgtcggctcacggccggtaccggaagtggttgctgcggcgggctcg

SEQ ID NO: 13478 - DNA, 436 bp, Glycine max
  misc_feature (271)..(271): n is a, c, g, or t
  Coding DNA Sequence Number=SeqID_3699
gcctccgaagaaaactgttcgaagcagcagcagcagcagcagcagcagcagcagcgcaagaggaagaggatgaagctccaagaagaagaggaagaggagaaagaggaagagaagaagaagaagagaaaaatcaaagacaagcaggaagagagatccaacgaagaagaggaaccgccgcaggaagacgccaagcccattggcgaaccggttaggctatccggaaagggaaggggccgcaaaaagcattatgaatccttcgagtacgacgganaccaatacacgctggtactaccttttctcgttagtaggaattatttcaggctattcgatttgaacgcgtgagtttcgatttcattttgtcctctgctagggtttacgtcatgtgcataattgtgttatggaaaataatcagtggacacccctacattaaatgaca

SEQ ID NO: 13479 - DNA, 495 bp, Glycine max
  misc_feature (56)..(56): n is a, c, g, or t
  misc_feature (68)..(68): n is a, c, g, or t
  misc_feature (78)..(78): n is a, c, g, or t
  misc_feature (81)..(81): n is a, c, g, or t
  misc_feature (131)..(131): n is a, c, g, or t
  misc_feature (141)..(141): n is a, c, g, or t
  misc_feature (222)..(222): n is a, c, g, or t
  misc_feature (290)..(290): n is a, c, g, or t
  misc_feature (386)..(386): n is a, c, g, or t
  misc_feature (457)..(457): n is a, c, g, or t
  Coding DNA Sequence Number=SeqID_3700
tactagctatcgtgcgtacactccgctacagtatatgacgtgatgctctcgtctgnccgcacctctangtgctgcgtnatnctcctcatagggatatacgatacatagtatgcatactacactttgcacangcagcagcangtagtattgagagtgcatagcgagtcatgtgcgcagtgagcacatctcgctcgcagtgtacagacacgatctcatgtgcgnttgagacgcttctagctcgtgcctaacgtaggatagtacctctctcgtgatgaacgtaacttagtagngcacaagaacctctagtccagtgtacatgacctagtgttgattgcagtgatatatgtatcatctcggtgtctgcgctcgcgcatagatgtgtgcantgttcgacactcgcttacgagcaggctatgtatcggtcacatatgtagtacgcatgcgtaatgaccagtantgctactaagcactgacgactactcataccaccagtgt

SEQ ID NO: 13480 - DNA, 507 bp, Glycine max
  Coding DNA Sequence Number=SeqID_3701
ggcttcttaaaatcatggttcgctgtagcaacaacctcgttggcatactcaacttcatcgtcttcctcctctctatccccatcttagctggaggaatctggcttagccaaaacgaaagtggaatccctaacctctacagcctccactcttggattggtattggtgtcatttctctttatggcttccaggtaaaccttagaagtgggttgcttccgtggcacgcaatcctaggcctatttgtttatatactcgcggttgggaacgcagctttagggtttctggagaagctgactttcctggagagtggtgctaagctcgacaagtacgggccagaagcgtttcttgtgaacttcacagccattgtcaccattctctttggtgccttggtggtactcactgcttctgctaagtctccctcctccattgacgatgctgataactacagctattctgctatatgaaaacgctttatacatttcttcagttcctcgcatatctttgctgcta

SEQ ID NO: 13481 - DNA, 396 bp, Glycine max
  Coding DNA Sequence Number=SeqID_3702
gcacggttttcacattcatggcatcttacaacaactatccaagcggctatgctcttaagcgcttgcatcagataagccatcctgcaaatgtaaagggagaagagtgggttcacatagacacttttagtgctatgaatggaatatctcgcttttgtgaaagtgcttttccgtggagatactcaaaagaggaagaaatggtggtggaggagttacaaaaccgaaacttcacctaccttgtgaacgagcacccgtctgtggatggatacaagtgcttgttttctgaagaaggcttcgacagagtcgaactgcggcaaggtttccctcccattgttctggtaaaaagagccaaagtatacgtgcaccaggatatgaaggcggatgaccagttgcataaga

SEQ ID NO: 13482 - DNA, 580 bp, Glycine max
  misc_feature (47)..(47): n is a, c, g, or t
  misc_feature (184)..(184): n is a, c, g, or t
  misc_feature (302)..(302): n is a, c, g, or t
  misc_feature (307)..(307): n is a, c, g, or t
  misc_feature (321)..(321): n is a, c, g, or t
  misc_feature (341)..(341): n is a, c, g, or t
  misc_feature (367)..(367): n is a, c, g, or t
  misc_feature (380)..(380): n is a, c, g, or t
  misc_feature (429)..(429): n is a, c, g, or t
  misc_feature (438)..(438): n is a, c, g, or t
  misc_feature (499)..(499): n is a, c, g, or t
  misc_feature (504)..(504): n is a, c, g, or t
  misc_feature (551)..(551): n is a, c, g, or t
  Coding DNA Sequence Number=SeqID_3703
gatcagtcgacggtgcactcgcgatgtcctgtcgcgttcacgtagantgtataatccatactatatgcgtatctctagcgcgttccgtatgatgtaagatcactctagctctctatagcacgacacctcgaagcatatcatatgtttgtgtgagaatcactatatatccgcagagatgatatantggatctcacgttttatcagctactgtagttacacagtcatcgctctcagacatgtacatgtatggctctatcgtctacctgagaaatataacgtgacagatcgatatgagagagcantatcngacgactcgagcgncaaagcgactacgtaacagntcgatcatcgtgcaatcatagctgantcgtcgatactcntgatctctcacgacacaatctacgcacgagagtcagacgccctgtacantctaggaantatacgtaactcgtgatactgtatactgcgactgtcgtcgatcctacagatgtcgcgacgntggtnctagtcctctgtgtacacttgtgagccgatgtatagcgagccatcgnacgctacacgacgcatgccagacagatat

SEQ ID NO: 13483 - DNA, 278 bp, Glycine max
  Coding DNA Sequence Number=SeqID_3704
tccggtgtagacatagtggatgcaccggggtgcaggaatgtcccacgaggccgttgcttagatcgcagtacgttgaaaagcaccagcacaaaaaaaaacgcatggcagctcggagcctcgggtctctatagctgtaagcgtaacaaccgcacgcttactcgggtgtaaaaagactgcaccttttcacatgcacacccgcgtgccaagatccctctccttcccgagatgcgcaatgcgcgccgagaaaacaggctgcgccggaggcatatgcgccccga

SEQ ID NO: 13484 - DNA, 227 bp, Glycine max
  Coding DNA Sequence Number=SeqID_3705
atcagtcaaggtctgcttacgcaaattgaggttcgccgctaatacgtggggcccttctccatctctcaaggcgaaaagtttcccttccggagcgtgtagccatatatgggtgaaactttcagatggatgaaggatggtgtatactgtgggaatgtgctccttcgcgatctatgagcacatagtagtgacgttaactcacattcgcactcccgtgagcacttctgata

SEQ ID NO: 13485 - DNA, 214 bp, Glycine max
  Coding DNA Sequence Number=SeqID_3706
gttgcccctggttaaagctaccatatacctgaaggatgtgctggcccacaaacaagccataccattccgacgcttttgtggtggtgttgggaggacagcccaggctaacagcatactctccaatggtgaatgacgctggcccgtgaaatcacttaacttcatcctagatttgctgaagaacgctgagagtaaggctgacgtaaaaggattggat

SEQ ID NO: 13486 - DNA, 476 bp, Glycine max
  misc_feature (206)..(206): n is a, c, g, or t
  misc_feature (383)..(383): n is a, c, g, or t
  Coding DNA Sequence Number=SeqID_3707
ggattagcgattttatctttccaacctactatcctcgtcaagatacaactgtactccaagtagtcagcactccacgacaaaatttctccatagcgaatatgggagagaatgaggagggtatcatattacactataaagcacactcacagctggtcctccttcctagcccaacgcgatctgtgttttgatgttgtgctgagggtcangttgcgtgtacgactctgaatgcttagagagagtagtagaaagtgcacatacaccacagtagataaacgggtatagtagtgtgtggtccttatttctatttttacaatcagaactacgtctttggctgcctgcgttcactctcgtatcattactcttctcttgtctaatatattatngttcacacaagcgaccggggtgatgtccatatggtgtggtgagtggccggggggggaggaccacacccatagacttactcttccctctagagg

SEQ ID NO: 13487 - DNA, 567 bp, Glycine max
  misc_feature (527)..(527): n is a, c, g, or t
  Coding DNA Sequence Number=SeqID_3708
gcttgtccgcatatatgaatatcaaatgatgatgcggagaaacgtgcgagaaggcatatgagagcgcggaacatgcaatatagcatctgacgaaagtatatcacgacaatagaacacactaatactagtatagttatgagtattcagctagctgcaagaagatggtataaagggcggcgcgcggagacagtagtcacacgacgcggagagcagatatcgcaatatcgatagtataagagtgacgtagactgtcgacgggtaatcacgatgtgtatacttcaatagaacgcggacctgcggagatgagacaaggtagtagagtaggcatccacaaacccgaaacccgcaatcactcatgaacgtcgaaggcgctgctgtcggttgataggatggctggatcaacgtaacgccctttcacctcaagagtgtgagcggaggaacatactcgagcgcgttgatgaaaatctgagacgcgctcacgagtgagcaccgcgcgcacactcagccgcacaaattacctatcacanacaatgtaggtatgagatgtttatgttgacgcgctctaga

SEQ ID NO: 13488 - DNA, 383 bp, Glycine max
  Coding DNA Sequence Number=SeqID_3709
gggcggtcattcctgagattttttttgtggggggggcagagttctccagaatttttaatggcctgaactttgaagacaaacttcttccaggtggtccctttgcccccttgggggttgcaaatgatccagcccaagctgcctttttaaaggtgaaggaaattaagaatggccgccctgctatgtttgccccgcttggtttttacttcccagcatatgtccccggagaaggtcctgtttagaacctagcaaaacatttcagtggcccttttggcaacaacttggtccctgtcatttccgggttttcttaaaaagctcccactctttaaatccttcattttcatggttttttcccattttaatgggccatacctatccctgagata

SEQ ID NO: 13489 - DNA, 400 bp, Glycine max
  Coding DNA Sequence Number=SeqID_3710
gacctcaatcgattcttgaaaatggtttccgcgcgtgaggagttcgtgtacatggccaagctcgccgagcaagccgagcgctacgaggagatggtggagttcatggagaaagtctccgcctccgtcgacggcgacgagctcaccgtcgaggagcgtaacctcctctccgtcgcttacaagaacgtgatcggcgctcgccgcgcctcgtggcgcatcatatcctcgatcgagcagaaggaggagagccgcggcaacgacgaccacgtcgcggcgatccgcgattacagggggaagatcgagacggagctgaccggaatctgcgaggggatactgaagctgctcgattcgaggctggtccccgccgcagcttcaggtgactcgaaggtgtttatctgaagat

SEQ ID NO: 13490 - DNA, 506 bp, Glycine max
  misc_feature (29)..(29): n is a, c, g, or t
  misc_feature (43)..(43): n is a, c, g, or t
  misc_feature (58)..(59): n is a, c, g, or t
  misc_feature (73)..(73): n is a, c, g, or t
  misc_feature (81)..(81): n is a, c, g, or t
  misc_feature (89)..(89): n is a, c, g, or t
  misc_feature (117)..(117): n is a, c, g, or t
  misc_feature (133)..(133): n is a, c, g, or t
  misc_feature (145)..(145): n is a, c, g, or t
  misc_feature (156)..(156): n is a, c, g, or t
  misc_feature (272)..(272): n is a, c, g, or t
  misc_feature (277)..(277): n is a, c, g, or t
  misc_feature (304)..(304): n is a, c, g, or t
  misc_feature (306)..(306): n is a, c, g, or t
  misc_feature (327)..(327): n is a, c, g, or t
  misc_feature (333)..(333): n is a, c, g, or t
  misc_feature (338)..(338): n is a, c, g, or t
  misc_feature (343)..(343): n is a, c, g, or t
  misc_feature (369)..(369): n is a, c, g, or t
  misc_feature (371)..(371): n is a, c, g, or t
  misc_feature (384)..(384): n is a, c, g, or t
  misc_feature (387)..(387): n is a, c, g, or t
  misc_feature (427)..(427): n is a, c, g, or t
  misc_feature (430)..(431): n is a, c, g, or t
  misc_feature (434)..(434): n is a, c, g, or t
  misc_feature (437)..(437): n is a, c, g, or t
  misc_feature (465)..(465): n is a, c, g, or t
  misc_feature (476)..(476): n is a, c, g, or t
  Coding DNA Sequence Number=SeqID_3711
tgcgtcctactcagctgctactcaactancatcaacgtgatcngtggtctgctcacgnngcgtcgtctgtcancgacgtgntgacagangtacatcagtgatcgacggacaagcatnacatcacatcatcgcntactacatcacncgtcacgatantgtgccgcgactaccactagctgccgcgtagactacgatgcgagtgacaggcactgctgaacaaccttaaccctcatccacgacaccgacagcgcccaactacacttactttcttncgatnctctgtcgtcacatccgatacacactncncgacgtgacgtagtgcgttancataanacgtncttanacgactccgtacgctgctctgcgctngncttcatcgtcgcncanatcctgctgactgctgccgaccactcccttcatctacgancgnnctnatnctactttccagtttcgtctgctcgtcgnctcttttcatnagtcacgttagtatgtgcatttctagactg

SEQ ID NO: 13491 - DNA, 518 bp, Glycine max
  misc_feature (301)..(301): n is a, c, g, or t
  misc_feature (374)..(374): n is a, c, g, or t
  Coding DNA Sequence Number=SeqID_3712
taactccaaataataatgcgggcgcacccgtcggaggccacgagatcgcgcggagcgagtaacgaccgcttgtccgtttgtgtgcgcgtacggcggtgtaattctacaatatatcccttcttccggaaaagtggataacttagggttgtggtgggcgcggctcgtgaatctcgcgcggcgcccaaccacctcacacatccccatgtatatattgtagtaacctttaaaatcaactttcgttgtcctcaacgcgtatgatcattacacccccgagggtggtgctaactcacaaaaaataagnccgagagggccgtagagagtgaaaaataagactcgcagaagaccacaacctcgaaataagactaacccataantgtgagggtagtacagcatcacaataataatgtaacgtggtgtaaagcgcccccagcgacaaaacagtagaaagaggtgtaatgcagactttagttcacatcgtctggccgttacttgttagtatcgtgtggagacaccccttc

SEQ ID NO: 13492 - DNA, 515 bp, Glycine max
  misc_feature (180)..(180): n is a, c, g, or t
  misc_feature (479)..(479): n is a, c, g, or t
  Coding DNA Sequence Number=SeqID_3713
tcgtggcgcggagaacaagagacccgacagggacgggcggcgcgggtagagagacactggtcgctgcgcaaggtggtaggatcggaggcggcgggggagtgcgacgcgcgcagggaggtagagcgagaagagatgtggaggttgagtgtagtgtgtttgtgggagagaggtgtaataggntgggtgtcgtgtgtacagcgagattaccgcgggtgagcaccacatgcgatgccggcagatcggttcggatgagccacgccgcgaagcctcgcgagcatagctaaacaaaagcaagccaactgaaaacgacacaagatattagaatttatttaatgcgagatgaaaaagtcgccagtcttacgtctctccaggaatagatccgcgagtcttctcaacgacttattgcctcctctcggttacttttgcttctctcctatctcctctctctcttctcttttctgtttattacacaaacaacnttgtttgttagaagtcgcatttttgttgcgcacgtc

SEQ ID NO: 13493 - DNA, 244 bp, Glycine max
  Coding DNA Sequence Number=SeqID_3714
tttttttgtgtgctttgcttttcttctccttgctggtatttgactcgggtgtctgaatcggttgctgcagcagggtcgggagccacagctatgcagagccaacttgtgtgcaatgtatgtaggagccttctgctttacccaagagggccatccaatgtttgctgtgcatggtccaccacacttacctctgttccttcccctgttatgcccctgctccccctttatcgcctttgctcctttcttc

SEQ ID NO: 13494 - DNA, 224 bp, Glycine max
  misc_feature (93)..(94): n is a, c, g, or t
  misc_feature (137)..(138): n is a, c, g, or t
  misc_feature (147)..(147): n is a, c, g, or t
  Coding DNA Sequence Number=SeqID_3715
tacttttcgagaaatcgacgcggaaagagcttcttcttcttcttccatctctccgattcgcaaagaaggaatgtcgagtctatacagaggtgnntcaaggaaagagaaacccagacgtcatcatgggttgaatcagnngaagaggcnagagatcaaggaagcttttgatctctttgacactgatggctctggtaccatcgatgctaaagagcttaatgttgcta

SEQ ID NO: 13495 - DNA, 508 bp, Glycine max
  Coding DNA Sequence Number=SeqID_3716
agtctgacgacttgcttgatgctgccaaatcgaacttggcaaaagcccttgcgttggctaagaaacagtagagcaagagatgatgaacggtgatgacctttcatccattgcgctggagcttcgaacaggaaggacctgtccatgcaaacctcgtatctggaatgtcaactttcaaggggccaactcagaagctatgcttggtgactctaaggctgctcccatccgtgtgcagcggatcagcccccaggctccgcagttgcgctggtaggttttctgtggccggtcactcggaaagggaagagtttgaagaaattctggagtaggatttgactgtaagtttgtaacaagcatgcgacatgaatatgaaccgactgtacctgtaccctgtacataacacctcaaagttttagctacaaacacaactcactttcactgtaagatcagttgtcacaacgccgtctctttttttttttttttggcgacaccatctccggtttgaagttgtgtt

SEQ ID NO: 13496 - DNA, 540 bp, Glycine max
  misc_feature (149)..(149): n is a, c, g, or t
  misc_feature (185)..(186): n is a, c, g, or t
  misc_feature (299)..(299): n is a, c, g, or t
  Coding DNA Sequence Number=SeqID_3717
agggacccgccatcacagggacaaagctcacgataccccgttttgtatcctgtgttaactatcacgactaccatttactcccctaccaccagcttactattcaacgccgctccataatcaagtcctctctcaccacttcccttgcccantcggaacattcgtacccgccgttaactattctcgtnnacactttcggcgcctcaacaccagttaggccaaactacacgcctcccatctttttttaaatcccactaatgaccgacaaattgtgccccatcaccccctctatttaactcccnaagcaaactagacccctagcataggtggcttggaccggttcgttctttcaccttttggacaacaaaaaagtcccaaccttattaaatagtaaccggtgggcctctcccaccccgtaaaaacgggcccataaaacaaccgttttactcaagggccggaagcggcccccattaacggggaaacctatcccaccccccaacccaagttctttctctcggtgattatacgtctggccccgataaa

SEQ ID NO: 13497 - DNA, 199 bp, Glycine max
  misc_feature (33)..(33): n is a, c, g, or t
  misc_feature (40)..(40): n is a, c, g, or t
  misc_feature (53)..(53): n is a, c, g, or t
  misc_feature (96)..(96): n is a, c, g, or t
  misc_feature (124)..(125): n is a, c, g, or t
  Coding DNA Sequence Number=SeqID_3718
tattggccccccagagtattccagaataagatnttatttncggagctggcccnggggatatttactctatccatgttttgggattccatgtgcctnaaaatggactttccagtctttcactggnngaaaaccatttctactgggtgcttgtttgtttcatgatatgtttagccaatcaaacgtaaaagactcaatcatt

SEQ ID NO: 13498 - DNA, 500 bp, Glycine max
  misc_feature (35)..(35): n is a, c, g, or t
  misc_feature (49)..(49): n is a, c, g, or t
  misc_feature (186)..(186): n is a, c, g, or t
  misc_feature (256)..(256): n is a, c, g, or t
  misc_feature (264)..(264): n is a, c, g, or t
  misc_feature (319)..(319): n is a, c, g, or t
  misc_feature (327)..(327): n is a, c, g, or t
  misc_feature (336)..(336): n is a, c, g, or t
  misc_feature (446)..(446): n is a, c, g, or t
  misc_feature (448)..(448): n is a, c, g, or t
  Coding DNA Sequence Number=SeqID_3719
acatcgtcgcgctcgtaaagcaaaacgccggctcngctagagacatacncacatgtacatacgtctcatagatatatacatcactctagtaccgtcgcctagtactgaaaaccaatatataattgtcatccatctctcctcgctcgctctccgcgtcgagcctgtcttctcttgtcctattgtacntatatataacacacgatagacactccgatctccataacgatgctgactacatcacactacagcagcacanaccgcganaggatgatgaccgcacacccgactatctaagtatcgcgtggaatattactgttancatggcgncggcgcggntgacgaggtgcaatgagtgagagaagcaatcagttagggtcttagacacaatagacacgtcgacgacgtcacactctcgtcttcatcgtgccctcactgctcttctctantntgcatacgctgcgctccaccacctgcatctgctgtgttgatgcgaacggtgc

SEQ ID NO: 13499 - DNA, 588 bp, Glycine max
  misc_feature (91)..(91): n is a, c, g, or t
  misc_feature (199)..(199): n is a, c, g, or t
  misc_feature (201)..(201): n is a, c, g, or t
  misc_feature (325)..(325): n is a, c, g, or t
  misc_feature (351)..(351): n is a, c, g, or t
  misc_feature (371)..(371): n is a, c, g, or t
  misc_feature (408)..(408): n is a, c, g, or t
  misc_feature (412)..(412): n is a, c, g, or t
  misc_feature (414)..(414): n is a, c, g, or t
  misc_feature (424)..(424): n is a, c, g, or t
  misc_feature (443)..(443): n is a, c, g, or t
  misc_feature (483)..(483): n is a, c, g, or t
  misc_feature (540)..(540): n is a, c, g, or t
  Coding DNA Sequence Number=SeqID_3720
ggcccttatgtgctgtacgacatgtcctgtatgtcactataaatagaggagagacgtcagcctatatccactctccattcttgttgcgatnatatgacacgcggccgctatgtatgtgttagtatatgttcactcacacatcgcgcgcgcgggtgtctagctgactattttaattctcgcttctcgcggacgtcgtatntntctcagcccgcagacgttcgttggcgccgcggcgagctcttacgcctcactacactatactaagatactgtacctagtcgagtcaacgcgtcagacacatatcatactcaacgaacgcaccgcngtcgatatatacttattctatatgtncgatcatacataccacatantcgcagccctctgtctgcgcagtgagatgtctccacnggtntnacgctgatanatctgatttgactatactnactaatcatgcactgacgctgcaactctgagtaatctctnataactaatcgacgttctgatattcatctatgagactatagatgtagagattaacgngtcggtatctgctggtatacatcgacatccgatattctgtctgatcat

SEQ ID NO: 13500 - DNA, 492 bp, Glycine max
  misc_feature (40)..(40): n is a, c, g, or t
  misc_feature (130)..(130): n is a, c, g, or t
  misc_feature (199)..(199): n is a, c, g, or t
  misc_feature (203)..(203): n is a, c, g, or t
  misc_feature (276)..(276): n is a, c, g, or t
  misc_feature (312)..(312): n is a, c, g, or t
  misc_feature (364)..(364): n is a, c, g, or t
  misc_feature (453)..(453): n is a, c, g, or t
  misc_feature (464)..(464): n is a, c, g, or t
  Coding DNA Sequence Number=SeqID_3721
ttgtctatcagctcgttcccatgaagggcgttgagaccantgagacacccagaccgacccgacgctcctctgccagttccataactcttctattcaattctctattaactactccaaccacatcactctngactaacacacggccaatgctcagatacatcatcaaaaatggcgtattaccccactaatgtgaccacanactnctacgcttatgtgcagctacgtgagccgaatgacacacgcacaccgctttcatcctcgtagagatattatagnattcgtcatacccacctcgtggtgagaacggtcaantacccgcatatagagatgtgatctatacgatgcaccgctgtgagacgagcgnatcacactatctgcactgccgcaagtactcgcacgcgcgctgtaaaaactcttgttctccgcagctaggtaggccttacgtcgcgatangcgtgcgatanacaagagaaccacagtactcagcttcag

SEQ ID NO: 13501 - DNA, 412 bp, Glycine max
  Coding DNA Sequence Number=SeqID_3722
gagtacgagatccatgtgctggaaatgatccgttcccatttgtagaatcacaaaaagggtggggagcaaacgaagttggaagaagggaagaaaatttttgctaatgcgaaaaaccgattgaacttctacaccaggggaaacggctatcgaacgagattactagcgttttcacatcttgagattttaattaaggtgatgttcatatgcccaagggagagaacatatggaagaatattttagagctgatgtgagtactgggaaaggcagcagtatccatcaattagattcaacaatcctagcccgaccaacttacaaagaagttctatcaaaggttgacgactattaaaagggattagaacggatttttttttttttttaaatgtgatagtaactctgctattatgtttgtgaa

SEQ ID NO: 13502 - DNA, 556 bp, Glycine max
  Coding DNA Sequence Number=SeqID_3723
atacgagagtggaaccccgtgaagaacgatgaggtccttggagggatgatagccgaaatgtgttgacttgcagttccatcttccctcccctgttagttcaccagacaaataccaaattgcatcagggattatttgatccctcctttgaaaacaaaacgatgcccattttcaaaacgccgattcaacggctactccgtaaagttcaggcccttctacgagaaccgtctggccgtggccaccgcccagaacttcagaatcctgggtgacggtcgcctccacgtcctcgacctctcccgggagacttccctccgcatctctgagctggtcggctacgacaccgtcgacgttatctacgacggggcctgctcggaatgccacgattcatcgagatcgccgccgtcgcccacggattccttaaggctcacccacctgtgccctcccgccaaactccaagccccatccggttccttcccaggaacacaccccgtggagggttcatctccggcggaataacaagccccgttccggcccgatgaccttcctttccgtgctactt

SEQ ID NO: 13503 - DNA, 447 bp, Glycine max
  Coding DNA Sequence Number=SeqID_3724
gaaccaataccagatctcacattaaaaaacaacatgaagacctcttcttaaagcctacacaagagctaggcactgtttatgtccaaaacaatggtcaagatcaaacatttggcagagtttttggcagaaagcatgagcctacttatgtctctgagcataaagacaaatatgccagaaagactaactatcaagagccagtctttggtaaaaagcacgacttgattcaaagacagtatcttcaagagattcgttcagagttacaatcagctcaaaaaagcaatgaagacttacataatgagagatatatgaatactcatacactaatgaattcgctaaaaagaatggtgccgttatgtcgccggaagaagagtcatgagagatcaaacgggaagagttgaccctatctagaacccagacttatggtgatctggctccttatagaagtaa

SEQ ID NO: 13504 - DNA, 310 bp, Glycine max
  misc_feature (209)..(209): n is a, c, g, or t
  Coding DNA Sequence Number=SeqID_3725
acaattcaagaacgcggtcaccatcaccccggaggatttcaaagggaactatctgcactacggggtgcgtgagttcgggatgactgctgcattgaatggcatggcgctccacggtggattcgttccctacggcggaaccttcctcacgttctcagactacgctcggaacgccgtgcgcctggcttgcctcatgaacacgcacacgatcntggtgtatacgcacgattcgatcggcctcggcgaggacggtcctacccaccagccggttgagcacctcgcaagtttgcgcgccatgccgaatatgacgctt

SEQ ID NO: 13505 - DNA, 548 bp, Glycine max
  misc_feature (122)..(122): n is a, c, g, or t
  misc_feature (364)..(364): n is a, c, g, or t
  misc_feature (390)..(390): n is a, c, g, or t
  misc_feature (449)..(449): n is a, c, g, or t
  Coding DNA Sequence Number=SeqID_3726
gtaatcactgcgatcacatactgcagcacattaccgagctctaactaaaatgtcacccagattcaacaatgataataatatccgaccagggagtggcaatgctcgtcttcgtgcactctcgntcatgataagcgataacctatatgtaatctcctcaatagaggcaccgactgtgtcactcacgctacgcttacaacgcgccttatacaatgccgagagagcgacacgagcgccacacacgttgtgaacgccacacacccaatcacttcacttaaggtgaatgacacgagccgtgtcacgatctttacatggtaaatcgtgtccagagttgtatatatgtacgtcgctgctgcaaatcacctcntgagtggagaccgcactatcactccnacagatctcagctgaatgcgtacacagacgacgagcatgaaatagttaaagagaccgcntcacactagagcgtcgtctgtcagacatcctatgatcgatgacacaccacgtcagacgcacagcgtattcaaatgatactcggtacacgtctatcacac

SEQ ID NO: 13506 - DNA, 481 bp, Glycine max
  misc_feature (176)..(176): n is a, c, g, or t
  misc_feature (184)..(184): n is a, c, g, or t
  misc_feature (441)..(441): n is a, c, g, or t
  Coding DNA Sequence Number=SeqID_3727
gtgcatcacgatagcgcatgttacttcggtgcgaccttagcacgatgattggtgctatacaataacgagtaacatgatgaggagcgaggtgatggaggtcgcgtttacgtctggagttgtgtatacaagggaagtatagacatcgagaggaatggattgcgattgactatatgatnacgtgcangaatatatggacggagtacattcgcgaaaacacgtgttcgcgatgcggaagacgcctgctcgttgatgtgtgctgttcgatcgggtgcgggttctggtgtgtggcgaattcgtctcgcaatatatagtctcgcgatatggcctatcgcgtgatcgcgtggttcctgtctatttacataggcgaatacactcaatcaccaaacgagcggtaggaggtgcggtgagtcgcgtgagagacatgctgtacctcacgtaagngttgatagatgcgcgtttcagggtacaaagtccgagcggg

SEQ ID NO: 13507 - DNA, 572 bp, Glycine max
  misc_feature (451)..(451): n is a, c, g, or t
  Coding DNA Sequence Number=SeqID_3728
tacattgtcccttactatataccgcatcgcctttccccttcattcatctcgtcttccttcatcatcactctctctgatgtttattatctgccatatagctatgcgactgcgtcaaggctccggctcatcccaatgtttcaaaggcgaggagtacgtgcggcgttcgcatctcgtgtcttctcaattcttacgtctctctatttactccacgctgctcacctaatgccctcattcgttgcgacaacaagaacgcctgacgaaccataccgtgcccgtccaccatcagttctttatcctcgtctcctacattgctgacgcttatgtatctgcatgctgtctctccttataaggtatccggagaagcgcaccacagtacgatggagaagtaatcactgtgaatgcgactcacgccatcgctataactacgcggctcgaccggcaccgcatcgcngctacacatgtccacacaaaccacgcggtctcgctccacgcgcccgctgacgatgccggcatgatcgctctcgctctacgcacagtacacccagcatcataatctatactagcgcgccgac

SEQ ID NO: 13508 - DNA, 542 bp, Glycine max
  misc_feature (107)..(107): n is a, c, g, or t
  misc_feature (200)..(200): n is a, c, g, or t
  misc_feature (268)..(268): n is a, c, g, or t
  misc_feature (369)..(369): n is a, c, g, or t
  misc_feature (410)..(410): n is a, c, g, or t
  misc_feature (422)..(422): n is a, c, g, or t
  misc_feature (441)..(441): n is a, c, g, or t
  misc_feature (477)..(477): n is a, c, g, or t
  misc_feature (503)..(503): n is a, c, g, or t
  Coding DNA Sequence Number=SeqID_3729
atctcacgcgacgtgtgtctacatactggctcatatagataaagatcatattacaaattatatataactgatcgatgtgtatatatgtagcagatgtatctagtctnacccctcgtcactcgcgctcgcaccttcatgcttaccacttcattgtacgacgatgcagcaggtcgagctcgcgcatcgctcgctgcgcgacncgccgcacttcagtatagctcgtgatgacacgtgatatccgttctctgtccgtctccgcctcattgcnatcgatcatctctctgatgatagtgcagtgcgatcagtcctgatcagtgatgccatgtacacgcgagagggatggagagcgcggcatgcacgcccacacgncagttcacatcgcatgacagtactacgcgctgatatacaangtaatccgtacntatacacatccgacatatnaaatgaaacatctcgaaagagaatgagacgcgatgntggtagatgatggggcgagtgagaanagacacgtgcgagtctctcatctatcacacagtgacata

SEQ ID NO: 13509 - DNA, 574 bp, Glycine max
  Coding DNA Sequence Number=SeqID_3730
agttcacggccataggagtttacttagatccttcagatgttaaaacccatcttgacaaatggaaaggcaagaccggaaaggatcttgccggtgatgacgacttcttcgacgccctggcctccggggagattgaaaaggttataagagtggtggtgataaaggaaataaaaggagctcagtacggtgtgcagctagagaattcggtgagagatcgtttggctgctgaggataagtacgaggaagaagaagaaaacgagctcgagaaagttgtaggattttttcagtctaagtacttcaagactcattccatcatcacttaccgtttctcagccaaagatggtatctgcgagattggatttgaaacggaaggtaaagaagaggacaaattgaaagtagagaatgcgaatgtggtagggatgatgcagaaatggtacttgtctggaagtcgaggagtttcaccgtccaccatcgtctccctcgccgattctctgtccgcagttttaacctaaaactccttatataagcctatatcatctatgtgtgtgttttatgttgttgtattatgtcgttctta

SEQ ID NO: 13510 - DNA, 354 bp, Glycine max
  Coding DNA Sequence Number=SeqID_3731
gtttgccattgggagccaaaaaaaggggttcatcaggagtaataaatttactttccccaaaggggaattcaaaaaaaagccccgccaaacaaaaaaaaaaatttttttgccccgaagggaaaaaattttgcctgggaaaaaaagggggaaagtcttcaagcctttttaccccaaggtgggaaagggcggggaactttatcggtggaaaacctggttaccatttcctggatggaagatttggaacaacctgaccaatggcccaatgaaaaatgttttgaacaaaaccccctccaggggttggtttgcccggtaatcccggaaaagggctttgcgggaccgccccaccttaaggat

SEQ ID NO: 13511 - DNA, 466 bp, Glycine max
  misc_feature (357)..(357): n is a, c, g, or t
  Coding DNA Sequence Number=SeqID_3732
gatgatgatatacaaaccggtcgatgtcagcgttcaataacgatgatacatgcaacgctacgatcgccatggtggttgtgtgataccatactaacactcacgcactgggatcacactacagcggctcctatgacagcaatcgaacaagagagcacacgatacgagatcgtgcgtcgccgctcgcgtgctgagctgtgtgtcccacaccactccacactctcctgcacgacatggtgcggggattagtcgtcggccgcccgcaccgtgagcgtcgaactcttggctgtagaccgagacaagatactacataacgactacagtaagatcgatcagagagggaccggagcacgtccggangtgcgcggtgtggtagatacgagatggtgacgcagctgacggcgagactcgtcgctgcatatcatactcggacagtatatgttggtgtgtgcagggaatactcgatgta

SEQ ID NO: 13512 - DNA, 523 bp, Glycine max
  misc_feature (432)..(432): n is a, c, g, or t
  Coding DNA Sequence Number=SeqID_3733
gcttatgtgatctcgaggtctgtacgtgtggtatggactcacgaggagcgagatgctgatcgagtggatccaggcgctgtcatttctggtacttcatctcttgaacttagtcgtgctatggttagacgttggatgaggtcggcatgtgtcgcagggcgtgagtgtccatataggcgtgccggtgttgttgagtgtgttgttggttatagtgaggatagtggtgggtgttgtgtgtaacttgtcccccgtcgacggcgcacctgcctctctctcattctctgtgatggtttctgatcgatcattgcacgatgtaggcgactttgcgccgcgggtgtgtctttcgtggtttctgttgcgtgggtgacagccctcacatccctggtccgtttctatatctgacggtgagcctgtgtctgcacatcacaggctcgngccagtgtcccggcgccctctgtacatcgcgccagagcctactagcgagggccggctttggtgtgcgacgcgatctcagtcttatgcatct

SEQ ID NO: 13513 - DNA, 595 bp, Glycine max
  misc_feature (38)..(38): n is a, c, g, or t
  misc_feature (49)..(49): n is a, c, g, or t
  misc_feature (187)..(187): n is a, c, g, or t
  misc_feature (200)..(200): n is a, c, g, or t
  misc_feature (357)..(357): n is a, c, g, or t
  misc_feature (360)..(360): n is a, c, g, or t
  misc_feature (443)..(443): n is a, c, g, or t
  misc_feature (562)..(562): n is a, c, g, or t
  misc_feature (564)..(564): n is a, c, g, or t
  Coding DNA Sequence Number=SeqID_3734
aatgtcatgatccatcactagcgcgctcgacccatcancctaacgtgcnagcgacagaaggcgacaatcgcaacatggtggcgccgcttacgaagacctcgagcgtgcgaccaaccgatgacttctgcacgacggccggaacatccgtcaaccgtctcctcgtcgcagactgcgcacgtgcggagantcgtgcctacgantcgcggctatagcgtgatgcggcaggtctttcgaggtggcagcgcgctgacagcgtcgacaggtgcgcgagctagacggctcgaccagatgagactaagcgccgattgcacctctgctgtgtaatgtcttcttagcctgtgtacactctcacacacngangcgtgtgactatacatgagtgatgctatatattgatctcagtgtagtagtgctctatacagatatatgcgctgtgagactgancactcaactgaacgcgcgacgggtgagcgcctgccgcgtgtctctagctacagtgagctgtcatgcgtctcgagtgtgtgcgtctgtgtcacgcgacgctagtcgtaccgcgcgaaaangntcatcgatatactggctcaagaacgacacgt

SEQ ID NO: 13514 - DNA, 225 bp, Glycine max
  Coding DNA Sequence Number=SeqID_3735
acgatctcctctgtttaaataaccaaaacaatctctctctctcttttttccttcttttaccaaaaataaaatcggttttaatcaactaactttcagtatttattcaaacaatttaattagaatgtacctttacaatgccatttgaatcttaaattattaagtaaggttgctaacttttattattaattaaactcaatatattttgtgggaatgaatattgcagat

SEQ ID NO: 13515 - DNA, 524 bp, Glycine max
  misc_feature (60)..(60): n is a, c, g, or t
  misc_feature (152)..(152): n is a, c, g, or t
  misc_feature (316)..(316): n is a, c, g, or t
  misc_feature (324)..(324): n is a, c, g, or t
  misc_feature (402)..(402): n is a, c, g, or t
  misc_feature (458)..(458): n is a, c, g, or t
  Coding DNA Sequence Number=SeqID_3736
ggtgactcacagtacgtatctgctagacgcagggcgatttagtccgagacaagtgttacntacatatctgtgctgagccacgcctacatgagcgatattgtggaacatcgtctagtcgcgcgtacgaatgcgtgagagagacgcgtgtaganaggccatgcgaatcgtatagaggaggtcgatgaacatctcgtccttcatgcgcttagacgcgagtactcggcgtctcactgcaggagcgcgagacgcgtcacgcgcatggtacatagcgcaatatgacaccgatactgcgcttagcctcattgctatagagctnctagtttntatacgcatggagatgacatcagatgctctgtcgtgtctcgaagatgtcgtcgggcgcataggcagatgctccgacantagcatctgacttccgtatggcgatatgatctgacagccgcgagacaccagcatcnccagcatcgacgactcactgctgaagctgactgcacagtcgctatgatcgtggtgcgaactcgctc

SEQ ID NO: 13516 - DNA, 307 bp, Glycine max
  Coding DNA Sequence Number=SeqID_3737
ggagggttcttaaattcagccagccttgcagacatttgcctatcatcagcgcattacaccttaatcatggtttgccacttcctaaattaagatagagctaaaaagcatcctcgtttatgttgacaatatgggtgaataccaacagcctattttttatgtagcttctcacagcttatagagtgcttagactgccccatttttggagaaattggttctcaaagatattgaggcatgattatttattaacagttctggataatttgagcatgatagccagggaatttggtcagtgtgaggtgacagccac

SEQ ID NO: 13517 - DNA, 472 bp, Glycine max
  misc_feature (283)..(283): n is a, c, g, or t
  misc_feature (325)..(325): n is a, c, g, or t
  misc_feature (380)..(380): n is a, c, g, or t
  misc_feature (391)..(391): n is a, c, g, or t
  misc_feature (397)..(397): n is a, c, g, or t
  Coding DNA Sequence Number=SeqID_3738
atagcaacagaacgcctaggagggagcaattctacctgctactactctcacatctactcgtccgtgggttgtgttggattggcttctgtgttattgatgatctttaacttttttctctcctctctgttcatcagttctctatttctcacataaattatagttatgacagaagctttaaatcacacaatataagatagcggagagaatagtggcgagagacagacgcagacaacaccacagtcagcatggtgctacgtgcgattggtatagagcctagcaatcnacgtgtgtttgtatgactgcgcgagggctttctatctccttnatataattggttgtgtaggaggaggtatgtgagatcggctaatgtatgataacancagatgagagnatatanaaccacgaataataccgtcatgtgtgagttagtgcattatgcgagaggacatcctcgcgtaccatccaggattaa

SEQ ID NO: 13518 - DNA, 417 bp, Glycine max
  Coding DNA Sequence Number=SeqID_3739
aattatgcaccaaccttagaggaatctgstwcattgctttccttcctcatakmtatgattcttctgccgaagaaagaaataactacattgaagtcttacaagaattggcaaaatcaaacagagctaatccagttacattcctctgggctcaaggaggtgattactatcctattgaagaatccttgggactcgcatccggttatccttctcttgttgctatcagcgtcaataaaatgaaatacgcccacttgactggttcattcagcaagaagaatgttgattctttcgtcaagtccttgattgctggcaaacaaggcttgttcgatttgagacaagctcccaaagtaaataccgttaatgcttgggatggaaaaaacagcaagcctcaatatgaaacctctgatctttaaagcttga

SEQ ID NO: 13519 - DNA, 565 bp, Glycine max
  misc_feature (54)..(54): n is a, c, g, or t
  misc_feature (58)..(58): n is a, c, g, or t
  misc_feature (115)..(115): n is a, c, g, or t
  misc_feature (122)..(122): n is a, c, g, or t
  misc_feature (125)..(125): n is a, c, g, or t
  misc_feature (278)..(278): n is a, c, g, or t
  misc_feature (413)..(413): n is a, c, g, or t
  Coding DNA Sequence Number=SeqID_3740
gtaagagtcgtgcatcggtcatctatgacgtcaggctgtataattagagtcacngcancacatgtattccatcatgaaatgtatactctaaatatgctcgtcataatcacaatcnagacggnagnagatgtctcacatagctactcgtcattgcgcagtctcagtgacgcgttggttggtgcgtgtgcgtgagagtatgtgtgttatgaagtaagcagttgcgatggatgtatgagatatgtgagagaatagctgcgtgttgagatgatagacggatnacgatcatagagaggttagtgagtatggatgtcactcgtgcttcactgcttactcataagatacacggtgacatccaattgtatgcgtagtagagtggtagagacgagatgggaagataaataagaagtagaganaatagcgatagcatggacccacgttggtgtgataatctatccaagttgtctattgacggctggtcgcgtcgcagacgggacgcccgggacgccgcagacgagttagtgctgacgcgagggagcgggtgtctattgatgcgtgagtgttggat

SEQ ID NO: 13520 - DNA, 438 bp, Glycine max
  misc_feature (91)..(91): n is a, c, g, or t
  Coding DNA Sequence Number=SeqID_3741
gatgaattcttctctctattgcgtcccgcttgtctcacactctctagctgctgttctatcgattttcctgagatgcgccttgttgtcgccncaaggtcggcgtggtcgttctcacaatcacgtcgaatacaccgacgacaagcgacagacatgagtagtagcgtttattgagtaatgttgatggtaatgtaatatattatgtgtgatattattgattgtctgcggaagactacattctgctcacccatcatcgcacgcggctgtgtgtaaataagtaaggacaacgatgacatactcaactacgattcattctgtatggtcgctgtatattttgtttgccacccctacatcctcataaccaaaatatgaagcaaccatttatacaaaaaactcatgagccacacacctcttcctgcactggcgtgttggccacactaa

SEQ ID NO: 13521 - DNA, 514 bp, Glycine max
  misc_feature (299)..(299): n is a, c, g, or t
  misc_feature (363)..(363): n is a, c, g, or t
  Coding DNA Sequence Number=SeqID_3742
gttcatcatctctatagtgcgcactgagtagctactagactagagctgggaactagttacccatcgtgttgtatcaccaccgtgcccgactccctcgctgaccgtaatgcaccatctatacgttacacaacacagctgtcgatcgtataatatgtggtgcatattatgcagctgatatgcgcgaagacagtagtatatcatgcgtaggcgtgtagcatatatcgtcgatcgtcgcgctcccggacgacactcgcgaagcgacaagagatttattattcgtggacggctagctataaaangtgacaacaccacagacgagcgacatgcgatgtgctctcgtgtgaatatagtatctcagataantgcataccggcgttctgttatcacatgctctcgagcagtgcgtgcttggctacatcatactatagtaatataaatagattctatcctactgccacagtgtgtctgatattcacgctgagactaacgataagcgtgctgtatctatctatag

SEQ ID NO: 13522 - DNA, 593 bp, Glycine max
  misc_feature (122)..(122): n is a, c, g, or t
  misc_feature (160)..(160): n is a, c, g, or t
  misc_feature (256)..(256): n is a, c, g, or t
  Coding DNA Sequence Number=SeqID_3743
gccgtgtagcgccacagatgtcattgtagattgttgtacgcaacaggcaggaatgcacaacaacatcgctagcagcataaacaggaagggcaacacgagtacgacacaaatgagcaaagagncgctcgagtgtgtgatacaatgagtcaagacttgaatncacagactgatagtgttgtgacagaattagaggttgatcttacactcacaatcacgcccagtgctatctgagcgacattcgacgaattatgtgcanaacgaatagtatgtgatatgaagagtcgtgtgtgacaccattcacccacgtcgagacctcgcgacgctgcggccggcgcgtcggtcgtcatgtctgcggactccactttacacagttacctggtcagccacagaggcacgtgagggtacgcgattgtcttgtatttgtgaggatttgctctcagtctcgattgagcctctccttctacagtagcttctaggtgcgtgtgcgtgaatagtagtgaatccagatttatattgatggggagattgctgattatcgcggagcagctgcgaggctggagcgtacgtgagggctagtatcgattgggcacaag

SEQ ID NO: 13523 - DNA, 597 bp, Glycine max
  misc_feature (53)..(53): n is a, c, g, or t
  misc_feature (181)..(181): n is a, c, g, or t
  misc_feature (241)..(241): n is a, c, g, or t
  misc_feature (342)..(342): n is a, c, g, or t
  misc_feature (468)..(468): n is a, c, g, or t
  misc_feature (498)..(498): n is a, c, g, or t
  misc_feature (512)..(512): n is a, c, g, or t
  misc_feature (554)..(554): n is a, c, g, or t
  misc_feature (556)..(556): n is a, c, g, or t
  Coding DNA Sequence Number=SeqID_3744
cctctcggagcgtcagtctaatagtgtagagtaatacttaatatataaataantcatctacgcgtgagcacacgtataatattacacactaaaattgtcgctgagcgagataggtcgtagagtccgctcggaacgcgatcgcgcggatgattgggagtatcgagggaaaatcagcgaaggngagatagcacagtatatagagacgtatatacgacgttgacgacgcctcagccacgcgcgncctatactactgtattaggacgctgaggtcttgtaaatcgtgatcaccctaacgccactcccgagactgcagacagtcgcggacgaggacacgacaagagnacgtgacgagaggagagtagaatgtgagaatgagtagggtatctcgcacgacgcgaccgcccccacgactagacaatactacacaacttgtatgtgaaataagcagctagtataccagtagtgcangaatgctcacaatctgacacgatctatagntagcatatagattntaattataatgagacggctacacacgcatgtggatgatgtantnattttatcactaagaccgtatgcgcatcgaacggacgacga

SEQ ID NO: 13524 - DNA, 405 bp, Glycine max
  Coding DNA Sequence Number=SeqID_3745
attctaactgagatacacgtacttgaaagcaagagaacactcactgccaatgatgatgcagatccaagtggtatttcaggacttctgaagggactctagataattgttcctagccaagacattaattctggtgaaaagaagggtggctgctgctaagattccgagctttagagcgtgttcactcctctttggaagcattttgcatccctccccggctccggcaacatgtagcatttgtaaagacggtagttactatttttggtcatcctatgatcagcagaatgtagcctatatctccttgtcactgtgcctgtttaatgcaagcatataaagtctttcttctggtataggtccgatctagctttaggcattcaatatgttaagacgagactaccggctgtgaag

SEQ ID NO: 13525 - DNA, 434 bp, Glycine max
  misc_feature (355)..(355): n is a, c, g, or t
  Coding DNA Sequence Number=SeqID_3746
aagagaacaagccaacccgacaaagggagtgaaatttattcggttataattcaattcttatatgattcttctatttctaacacttactccataaaaacatacagcttaagaactaatctccctaaacacgatataaaacacaggggataacaaactagactgtgaactacagagcgcgaggacaccactccaccgaaccacgcataaccaccaccgctacaccgacacaatactaatctctaccaaagacttgtggtatattacggacacgcaggactcctgtgtgcttccgggccctctccctacgactcactgcgggggtgaaaatgcgatgatgattcctatcccttctcgnatatactgcctctacctactataagaagaatctatgcgcggaggggacggggcccccgtgcactaagtctgacctatga

SEQ ID NO: 13526 - DNA, 168 bp, Glycine max
  Coding DNA Sequence Number=SeqID_3747
tttaaggccgggaagaactcactagcttctaacagcgggacgcccacccgcgggggggaactcccaggctttttggtccccttttaagcgcgcggctcatattctccaagcctctcgccgtaaatccatgggggcataaaacttgctttctcctgagcgagaaaattt

SEQ ID NO: 13527 - DNA, 411 bp, Glycine max
  misc_feature (101)..(101): n is a, c, g, or t
  misc_feature (104)..(104): n is a, c, g, or t
  misc_feature (159)..(159): n is a, c, g, or t
  misc_feature (178)..(178): n is a, c, g, or t
  misc_feature (242)..(242): n is a, c, g, or t
  misc_feature (359)..(359): n is a, c, g, or t
  misc_feature (380)..(380): n is a, c, g, or t
  Coding DNA Sequence Number=SeqID_3748
gagtgaaacacatagacaacgataaatacaatcaaaataacgacatataaaacacgatagaatatcacaaaagcgtatgaacacacaacattccactattngtntctagtgctcgcgcgccgtagcgtgtggcgggacagagatgagagagagggggcncgaggagagaggtgagggnagatgatggagggactaggcacgcgaacagagatacgcagagatgagcagagggggaagcgggnagagtgaggatagaaggagcaacgcacgcagagaggcgaaggaagagagtgaagagtgtgagaatactcagctgtaagagtatatgatggtagtagagttagcacgggtgggttgtngagtggtatattgtgtggtanatcgttggtggtggtttacatctcggatctt

SEQ ID NO: 13528 - DNA, 486 bp, Glycine max
  misc_feature (136)..(136): n is a, c, g, or t
  misc_feature (154)..(154): n is a, c, g, or t
  misc_feature (191)..(191): n is a, c, g, or t
  misc_feature (194)..(194): n is a, c, g, or t
  misc_feature (253)..(253): n is a, c, g, or t
  misc_feature (272)..(272): n is a, c, g, or t
  misc_feature (283)..(283): n is a, c, g, or t
  misc_feature (357)..(357): n is a, c, g, or t
  misc_feature (361)..(361): n is a, c, g, or t
  misc_feature (396)..(396): n is a, c, g, or t
  misc_feature (398)..(398): n is a, c, g, or t
  misc_feature (402)..(402): n is a, c, g, or t
  misc_feature (407)..(407): n is a, c, g, or t
  misc_feature (461)..(461): n is a, c, g, or t
  Coding DNA Sequence Number=SeqID_3749
agtgcgtcgcgggtaggtcctcttcctagtcgcgcgctctcgcttctgcagtgagtgcgtaggacctattgttctatctctactttacatcgcctcgggcgacacgcagcgcatgcactctaatgacgctaccatnccagctactgggggagangcgcttcgacactgcaaagtactaagtagtctctctnatngtcttcgctactcatgagctgatacaactactcactaagatagcactcaccatgtcggngcggtcgaggcgggctatnttgggtcgagnagtgtcgagccgtactcgtcgcgctagccgtctggtctatcgctccgtgctctgcatcgtaatctcatttcatncgtncgtggtgagagatacacacaaatatatacatatananacantatangcacctcttcccacgcgcacgcgcgccgcggatgggcgctccctcacctctgcntttgtcagaagaggcctgtcctcct

SEQ ID NO: 13529 - DNA, 552 bp, Glycine max
  misc_feature (29)..(29): n is a, c, g, or t
  misc_feature (325)..(325): n is a, c, g, or t
  Coding DNA Sequence Number=SeqID_3750
tgccacctccgtataatgcgtgttactantatagtatctactcttacaattatatccattaataatatgtacccccatactactactacttccctcactcttatctcatctactgatgtctacacactacgattcgcactaccgtacatctgcttataccttccgccgtcactcctccccggctaacgacttatcgcaccacaacaacaccacgcacacatccacacgtagtggaatgatcatactccatacaatcagtagctctcagacgccactccagtccgacacctcgcgctattctcatgtgtccgtaactgtcctacgnataactatacctacacctcgctctgaaatacatagagactatccttcgtctcgatgaagttgattataactctatcgcgcgctcgttgtcgtcatatctcaagaacacacactcactatgataagtatcgtgacaatctcctcacataaacacgccatcgacgacgtataacgtgctatcgataccagacgacaacgtcagatggacgatactcatcatcaccgcga

SEQ ID NO: 13530 - DNA, 417 bp, Glycine max
  Coding DNA Sequence Number=SeqID_3751
cagtcatgccctttaccctcatgaaggagaggcttgagttcctggacacagacaagtgtgagtgcaagtcgaccctcgtcgagggcggcggcatcgacacggcgatcgagactgcgacgtcgcacatcaaggtggagccggcggccaacggagggtgcttcgtgaaggtggactcgacgtacaagctgctgccaggcgtggaggtgaatgacgaaatcaccaaggccaaggaatccgtcaccgccatctttaaagccgccgatgcctacctcatcgccaaccctgacgcctacaactgaatcagttgagagggatcatatatgattatgatgtccctagtttgattcttttgtgctttcttcccgatgtaataaagctgctccatctctaagctacaaatagtaacgccgagggcga

SEQ ID NO: 13531 - DNA, 347 bp, Glycine max
  misc_feature (36)..(36): n is a, c, g, or t
  misc_feature (265)..(265): n is a, c, g, or t
  misc_feature (270)..(270): n is a, c, g, or t
  misc_feature (300)..(300): n is a, c, g, or t
  misc_feature (304)..(304): n is a, c, g, or t
  misc_feature (309)..(309): n is a, c, g, or t
  Coding DNA Sequence Number=SeqID_3752
ttttttgccaatcttaaagcataatgggatattganatatttaaaaatcaccaataaaataatcttttaccgattaaaccaattttttaaaaattttcaaaactggaagtttcaaatgccttatttttattttaatttagttttttttatcaacagtaaatagttatctatcatttaaattattttttttaatttacatactttatactttactggtattttaaaatagtcatactcccaaacttgaatggacttaattattcanagagngacaagcctaaactcttattaatccttgcnccanaaatnaaaactgagtttttcattagtcattaggccttttttat

SEQ ID NO: 13532 - DNA, 576 bp, Glycine max
  misc_feature (97)..(97): n is a, c, g, or t
  misc_feature (172)..(172): n is a, c, g, or t
  misc_feature (235)..(235): n is a, c, g, or t
  misc_feature (246)..(246): n is a, c, g, or t
  misc_feature (255)..(255): n is a, c, g, or t
  misc_feature (284)..(284): n is a, c, g, or t
  misc_feature (362)..(362): n is a, c, g, or t
  misc_feature (366)..(366): n is a, c, g, or t
  misc_feature (419)..(419): n is a, c, g, or t
  misc_feature (427)..(427): n is a, c, g, or t
  misc_feature (432)..(432): n is a, c, g, or t
  misc_feature (448)..(448): n is a, c, g, or t
  misc_feature (454)..(454): n is a, c, g, or t
  misc_feature (490)..(490): n is a, c, g, or t
  misc_feature (512)..(512): n is a, c, g, or t
  Coding DNA Sequence Number=SeqID_3753
ttaatttcttgactgcgcgcgtgccgttaaatcccatacgcccagcagcagcaccgtaagatatcaatcgaatatcgtagcgtctcgccctgctcantaatccacacgccacatatcaccgcctgtacgaatatttatctacgcgatcaaacacactctaatagtaatattnatactctccacctgtatgatgacagacgcgaggtccgctcctacacatacatcacccgccgcngactgcgagtnagccacacntatcctattcatatctatgtaagaatgancaccgcccggcgtggctgtctgtcaataataatgtgtattcatgtctgtacatgatatatacgcacacgacatacgtnagcnctgacgccgcactctgtatatgttgatttactcagcgtgtcacggaccgcgcngacgacanaccancatacgcgatcttttngagaangtgtatcgacaacctcgtactcacgattgacggagnagataataaccagagcactacnagtatctgctgcacggcggtgcgcctaaacaccgacacgattacacggcgatatatagtcactc

SEQ ID NO: 13533 - DNA, 566 bp, Glycine max
  misc_feature (263)..(263): n is a, c, g, or t
  misc_feature (309)..(309): n is a, c, g, or t
  misc_feature (467)..(467): n is a, c, g, or t
  misc_feature (495)..(495): n is a, c, g, or t
  misc_feature (539)..(539): n is a, c, g, or t
  Coding DNA Sequence Number=SeqID_3754
tatccgaagatgtacccgcgcgcgtctggtgttctgtccgacgcgcttcatgtactttccttctcctttctaggtctaggggagtgtcctggatatgcatcgtgtgctatttcatctcctacactgccacatatagcacgcgcccgggcggatgctcgtgacgatcgtagccgccacttccctcctccacggcgctatcgatatgtatcgacaggactccgctcaaagtctctcgcctactcccgccgcgatgcctctcagtnctacggtgtgaggctctctgctgctctgatcttggtgacaccgcgncactgctgtgctcaatatagtatctcatagagctgcgctcgtctgtatgtactgtcctcagatcgtccttgtctctcacgcgcgcttctcctcgtcctcgttctctcgcgccgcatctccgacgacacaacgttacgtatctcagtccgctgcgatancgactactagatcactctcgtatcttgntctcatatcgacgcgtcgtcgttgtcgctcgttcaccgattccngcggtgctactatctatgtcttcttcg

SEQ ID NO: 13534 - DNA, 438 bp, Glycine max
  Coding DNA Sequence Number=SeqID_3755
aacaagttttctacatccacacaaaaaaggttttccaaacataagcacacatttacagacatggatgatcttgagttattacaagatctgtcccaattcaacttcccagcaaccatcaagatcccatctaaaacctctaaagacaacaaagacggcgatggtgataacgacgagggctttagctgcagcacacccacatctcaagaacacaagattccttctgtccacgattctccacctcccccgccgagaaaacctcgtgcactgccttcaaaaccgtcgcctacggcggctctggtgataagatcgtgtaagaggaagctcttagtgtcggctcctgagattatcatgaacaaggaagagattgaccgtttcttctcctctgtctatagtgacacgtcaacgacggctaaacggcggagacgttatctttattgt

SEQ ID NO: 13535 - DNA, 485 bp, Glycine max
  misc_feature (170)..(170): n is a, c, g, or t
  Coding DNA Sequence Number=SeqID_3756
ggctttgataccatgtcctgaacctaaactaactatcctaaaagcttaaaaacttctcaataagcactcataagagaagaaaataggaggcaaaaggtataaaatttctcccctaagttaaaatcaatttattctcagcttttagagaagttagatgaaagaacctctanaaaactgatgtgcataagttcattttaacttttgggaggaattttattcctcttatcttcccatgttctttttgtataaggtgttggtgaaaagttcatctaaacaattatgtgcttgctgggttcatctgacaagagacacccccagcttcaaagttctagcaagcactcctaggtcatgcttggaatttggacatgggttggcactttcgaatttttaaggaaaaatcacctcccaaattttggatgtcttcccattttgacaaacatgccagacctactttggtttcgtgctcataaagtccacggcgctcc

SEQ ID NO: 13536 - DNA, 555 bp, Glycine max
  misc_feature (67)..(67): n is a, c, g, or t
  misc_feature (244)..(244): n is a, c, g, or t
  misc_feature (420)..(420): n is a, c, g, or t
  misc_feature (435)..(435): n is a, c, g, or t
  misc_feature (450)..(450): n is a, c, g, or t
  misc_feature (462)..(462): n is a, c, g, or t
  Coding DNA Sequence Number=SeqID_3757
gagaacatactctagcggtcgtatatatcgtgactctccatttctatcatcgtattatggaccgttntactcacagactcatcatatagatctcccatatcctttatcacgacagcactgtaacatcaactatgttggtctgcctcgtcagctctctttgcgcaacctcacgactctactaacttgtgtccatcttgcagcacacgcgtgtagtctgtactagtgaggtaaacacatccatacnctcataccatctctcagtctcccattgcagcgcacaacgcatatcgaatcacgacctacatctcacacactgcgacgcgcccgcggctcacgcacagctgtatcactcattgcatcttctctctactttatatcccgcgacacctgtgtgcagcgcattattctctatgctcatcnccgcagctatatatnttgatatcacacctngcactgtctctnacttgtatcactatctatgcgataacgactcgtctctatgtcttgtatattatctctctatcttcgtgatgctactctaacactctgtcttgt

SEQ ID NO: 13537 - DNA, 567 bp, Glycine max
  Coding DNA Sequence Number=SeqID_3758
gtattgttcactcgtgagcttgcaaaacgtctggatggcacaggtgtaactgtcaatgctgtccatcctggaattgtggataccaatattgttcgtaacagtggatttttcaccaaaatgttaatgtatatacttacaccagttgtttggccgtttattaaaaatccaaaacagggtgctcaagctgtgttacatgttgctctgcatcctgatctcaaacagacaacagggcaatattttaatctacgagaaattagtgaaccatctaaggaagctctcaatgataagttggccttgtggctttggcttacaagtgagaagtggacgaaattgagggagacttgcaaggaattaaatattcaaccactgactcatccgtgggagtcagtgaacaacatttcgatatcagcttctaaactgaagtcaaatactatcagtgtgaatggtatgagccaggtttctcccagcaaaatgacagccaataacgtagcttcctagcacaggcctttgtgccttaaggggcactatgactattccttgtagatgtgatcacacttatttccccta

SEQ ID NO: 13538 - DNA, 576 bp, Glycine max
  misc_feature (91)..(91): n is a, c, g, or t
  misc_feature (97)..(97): n is a, c, g, or t
  misc_feature (99)..(99): n is a, c, g, or t
  misc_feature (225)..(225): n is a, c, g, or t
  misc_feature (273)..(273): n is a, c, g, or t
  misc_feature (285)..(286): n is a, c, g, or t
  misc_feature (338)..(338): n is a, c, g, or t
  misc_feature (362)..(363): n is a, c, g, or t
  misc_feature (365)..(365): n is a, c, g, or t
  misc_feature (404)..(404): n is a, c, g, or t
  misc_feature (416)..(416): n is a, c, g, or t
  misc_feature (439)..(439): n is a, c, g, or t
  misc_feature (481)..(481): n is a, c, g, or t
  misc_feature (516)..(516): n is a, c, g, or t
  misc_feature (518)..(518): n is a, c, g, or t
  misc_feature (523)..(524): n is a, c, g, or t
  Coding DNA Sequence Number=SeqID_3759
ctcgtattgatatgtagctgactctatgtggcgcgtggcagtggttgtgttgatgatacgtgtgtgtattaagtgtggtgtgctgtatatntatatntnatatatacataactaacatactacatactagtatacttatatacttcatcacctacccctcgctgcgacagccacgcccgtatgagtatatcttatgagtatatagtcgtatcgctcgagttcatncatacaatcgactgtccatattgcaaaagaagaaataatagttatgangggtgtatgtgnngggtagttactgttgctctctgaggtatactcagctgcttgcaagcatgatngacgactcgtcactacatatacannanacaacaagtagcgtgattatgatggacgtgcacacagcntcaggcgcgccnagctgagtatatcttacggatantacatcagcacgtccctcgcccacacactgctcactgtcgtngtctccacgctcgccatctctccttgaggtcgttntngtttnncggcgcgctctcttctatctacctactatattctccacactctatatttctc

SEQ ID NO: 13539 - DNA, 293 bp, Glycine max
  Coding DNA Sequence Number=SeqID_3760
aaaagcactcgatgtatagccctgagtcgagttcatgctctcaccttgccgctaattcagagggaagttgctagccataggtcctgtatggcttgatatctgttcgtgatcatatactgctaaattagagtttcatggttggtttcttttttgggctatccacttgtatgaatcgctagacgtagacacatgtaggtaaggtttccagcgattagagtgtgctgattcctttcaccagcatcagatggtaaggaacaaacttagcataaaattgtgcctatcacttttagtcg

SEQ ID NO: 13540 - DNA, 403 bp, Glycine max
  Coding DNA Sequence Number=SeqID_3761
tgagtttttggtgtttgtcttgtaatggcgcgtcggtccggagattgcatgagatgtcttgtgatcttcgcggtggtatctgctctactagtgtgtggacctgcgctttattggagattcaacaaaggtttcgttggatcatccactcgtagaaactctgtgtgtcctccttgcgtctgtgattgcccacctcctgtctctctcctcgggattgctcctggccttgcaaatctctcaggtacagattgtggaggtgatgatttagagctcaaacaggaaatggagaagcagtttgtggaccttctgaccgaggagcttaagcttcgagaagcagttgcagatgagcatagccgtcatatgaatgttacccttggagaagctaaaagagctgcgtctcagtatc

SEQ ID NO: 13541 - DNA, 306 bp, Glycine max
  Coding DNA Sequence Number=SeqID_3762
ggtcttctctgcctcaaagcgcagctgcggcgcccccggccatgccatctggtgggcacgacggtgctctgcttgccgtccgttgtgattctcctcctccagcacatccttggcactcgcggcctggggtcgcggccgccattctttctggtgctcaccggcgagagtgtgccggtggacctccataacggacgtgcgcggcggcgcacgggccggcgctgctcctctacttcgtctctcgtcaggtgatccacatcgccgatccggccgccgccgaggagtgcctgacggcccacgacatcgttt

SEQ ID NO: 13542 - DNA, 369 bp, Glycine max
  Coding DNA Sequence Number=SeqID_3763
ggaggcgtccgtcgcgagctgaccggcgagagcggcatgctccgtacgtgcttgagccaacaagatcggcgtgcacgaagacgccatcgcccgtggccaactgatcagcgcggggtcgagaagactcgccttggttgaagaatcaagacgcgtgtcactggagttgttcacggcaggcggcgctgcacgggccaccggtcaagtgatttgggtataaacgcagcggaaaggagctggactggatytgaagaagtcaatcaaacaggattytccmcggcattaggcggccatgtgtgcccctcagctytcctttgtttcggcattgatgtcagttytgtatgagagcgaatttgcagtggcactttcact

SEQ ID NO: 13543 - DNA, 410 bp, Glycine max
  Coding DNA Sequence Number=SeqID_3764
tgagaaccaacaccctattactagcgaaaatgttgaagacaccaaaagaagtgtttccaaaaagcaagaagctggagaaaaatctcctcctcgctccgtcttaaagagcagaaatagaaacgagcaaggtggtgaacaagacacttctgctgctaaatctaaggtcactttcaaagaaggtgatgagaataaaggatccactgatagagaaactgaaaacactgaaaaggcagagactagaagtgacacccaagaaaaggaaaacccctcaactgaagagaaggcaagaagtcctgccaaagaaaccgaagaaagaactcaagaggggcccaaaagaagcgaagaaaagactcatgacgagccaaaaagaagtgaagaaaagactcaagaacaacctgaaagagctgaag

SEQ ID NO: 13544 - DNA, 467 bp, Glycine max
  Coding DNA Sequence Number=SeqID_3765
cattgattttgttttcgctgcttatctcaacgtctaatcatcatgggtttgaaggaggagttcgaggagcacgctgaggaagtcaagacgctcaccacgaaaccatctgacgcggacttgctcatcctctacggtctcttcaagcaagccaccgtcggcccagtcaccaccagccgtcctggaatgttcagcatgaaggaaagagccaagtgggatgcttggaaggccgttgaagcgaaatcgacggatgaggccatgagtgactacatcactaaggtgaagcaactcatggaagcagcagaggcttccgccgcttcaacttgatgaatttatatatgattcaccaaatgctccactccaataattccatctaaacttcaaataacttagcataagactttgttcttgttgcttcttgtgttttcatccttataaatctatcatttacattatgacctctgtcttga

SEQ ID NO: 13545 - DNA, 449 bp, Glycine max
  misc_feature (93)..(93): n is a, c, g, or t
  misc_feature (153)..(153): n is a, c, g, or t
  misc_feature (155)..(155): n is a, c, g, or t
  misc_feature (178)..(178): n is a, c, g, or t
  misc_feature (279)..(279): n is a, c, g, or t
  misc_feature (295)..(295): n is a, c, g, or t
  misc_feature (329)..(329): n is a, c, g, or t
  misc_feature (332)..(332): n is a, c, g, or t
  misc_feature (406)..(406): n is a, c, g, or t
  Coding DNA Sequence Number=SeqID_3766
gtactgattgttgtgcagaacataagctcaactcaatacacacacccacaacacacattatcgtaagacaacattgcggcatcactaaacatnccatatcgctcatcttggatggtatatatatttccgtaactatgaaatcgaggataggangnaaagcaccagtaatcgcgagcantacgtggcgcggcggggtgttgaggtgcatgcggtgatgctattcgaggtcgtcacgatggcctacttacatctaatctaactcagcgtggctgagggtgngcgcgggtatttcatnatagacacccctctcagctaccagcgactcacanccnaacaggagaggcaggcagaggccgtaatacttatatatatgattatacttaatatgtactcgtgttgtacactncgtcttcgtcgttcatcaagttatcaatcatctagttaccgag

SEQ ID NO: 13546 - DNA, 423 bp, Glycine max
  misc_feature (365)..(365): n is a, c, g, or t
  Coding DNA Sequence Number=SeqID_3767
ttctttccatgccacggagccagagctgcgagacaaagtacttgcaacaaaaaagcaccagagcccacacggatccggcgatgggagcggcggtgaagcgcgcgagggaggaggagccggtgtcgctggcgctggcgctcaccacggattcggcggcgtcgtccaccacgtcagccgactcggccggcgcgccggcggcgtccaggaagagggcgcggcggggcagagtggtggccacgtcgggggagggcgagttcgtgtgcaagacctgcagccgggccttcgccacgttccaggcgctgggcgggcaccggaccagccacctccgcggccgccacgggctggagctcggcgtcggcgtcgcnagggccatcaaggagcggaagcgtcaggaggagaagccgcacgagtgccacatctgcg

SEQ ID NO: 13547 - DNA, 569 bp, Glycine max
  misc_feature (26)..(26): n is a, c, g, or t
  misc_feature (317)..(317): n is a, c, g, or t
  misc_feature (343)..(343): n is a, c, g, or t
  misc_feature (442)..(442): n is a, c, g, or t
  misc_feature (507)..(507): n is a, c, g, or t
  Coding DNA Sequence Number=SeqID_3768
gaacgcttttctgtccacggttattnttgagccccacttgattctgcaacgacacagggagcgtgtcgatggcatggaaatgatatatcaccatgatagaagtttcagctatagcggtggtggacgcgatgtgagggaatttgagagcggccacaacagtatagatatgctcgccgttctgcgcggagtgagacgagagcgtgggggaacatacaaaggagcagagcgatatacacgaatgtgttttgctccgccggtcgccctgaggaacaatgtgagtagtgagagtcggcggacgcttgtaccatgccctaacnttagtggtatgtgggtcgaagatcanacgcgcacgaatagcgtgttgttaccacactacgacccacgatgccgtgagttggatcttacgaatctatcacacgcgctatggtatgtcacacacganatcgtgctgcgcacatatgcgtatagacacgagtcgctcgcgcatagtgcgccactcttgacttntgtagtatcgtgacacaccacacacgtgtctatgtggtgtggttataacacgcaccagccgc

SEQ ID NO: 13548 - DNA, 499 bp, Glycine max
  misc_feature (41)..(41): n is a, c, g, or t
  misc_feature (95)..(95): n is a, c, g, or t
  misc_feature (98)..(98): n is a, c, g, or t
  misc_feature (100)..(100): n is a, c, g, or t
  misc_feature (239)..(239): n is a, c, g, or t
  misc_feature (269)..(269): n is a, c, g, or t
  misc_feature (348)..(348): n is a, c, g, or t
  misc_feature (443)..(443): n is a, c, g, or t
  misc_feature (447)..(447): n is a, c, g, or t
  Coding DNA Sequence Number=SeqID_3769
ttatgctgcactaacgacggaccgacgcaccacggtatatntatgcttatattcgtgtaccgacgatctgtctactcgctctagctctagctccncancngcttatcttcatattgatatataagcgtatccctaccccactacagcctacagtaatctattcgtcatatactggtgccgctcccatgtctcgtggatacctcgagcgcgacatcgacgactaaatctgacgtactaancgttactactcctcgataactgtcaagttncacttgctgacgtccactatactatcagtactcacccacactcagcaactgtctaatcatatgatctgtagacacctgnacattgagtataatcaactgcatgtgtagctctctgcgcctaccttccgagatatgatcgacactggcacgcatctctacgctacacgcataaantcgnttgcacggcgtatatgactgcagccgtgatgtcatcgtgagtcggcgtatcg

SEQ ID NO: 13549 - DNA, 494 bp, Glycine max
  Coding DNA Sequence Number=SeqID_3770
acggtgccctcatacgcagacaaagccgccactggaggcgccccctaccacaccactgataagcctctgcgtgatagagtactgctcaagatctaggacgcacaggacaacactgcatgtgggatctgactgccaccccctgctcaaagcgacccgcaaggaggagaaaggaatgctgatgcggacgtgaagacggttgggaagagcacagaggatgtcagcgagaatacaggtgtgcaggtagagcattcaaagaatgcaacgactgacggggcgtatattggatcaaaacgatcgattcagaacgatatgacatcggtggcattctcgcaacatatgagggcaaggatcttaagcccataaatgatagagtcttcgaataggatacacaagcggatgcataaaccgccaggggtgtaggtcctcacaaagccacctcagaatagcccatcctatgcaacatggcaccttacatgtcataccagggcgggccg

SEQ ID NO: 13550 - DNA, 194 bp, Glycine max
  Coding DNA Sequence Number=SeqID_3771
atgcctgcagggtgcttaccatagccgatgcctatcttggccgttattggacctttgtaatagcatcagccatttaccttctgggaatgtgtttgttgactctagcagtgtcactaccagcattgagacccgcaccatgtgctcccggcatagcagacaaggattgccaacgagcattcgtcgttttcagtggg

SEQ ID NO: 13551 - DNA, 194 bp, Glycine max
  Coding DNA Sequence Number=SeqID_3772
tgccctgtgtccttacagtaaatatggcgattggttatcataggatctctcagcagggggctatctcagagataatcccatctaatgaagaaatggcaggcatgaatgtcttgcgacgttaaggaaaagggaccgtacgcctaaataagctttctgttccaatattcttgattgaggttttcccaaaaggagtg

SEQ ID NO: 13552 - DNA, 498 bp, Glycine max
  Coding DNA Sequence Number=SeqID_3773
tccttcttccgctagatcaacgagaagtactacccacagaatgagatctccgatctgctgcctaggagccaacgcggtggttgaacctgaagcgatgatcggaccgagaacacctcgatctccttacgagtggctcaaatccacggcgcaggagctcgagctcagagaacgttgccgccgggtcaagacacgcgtcaaggttacgtgccgcaacaacaactgcgctcatcacaaccaccaccaccaccagagacaccagagccagagctatcctgtggatttcagctacgatgcgttgagctacgccctcaatttcgaggacgatgtacgtgcggacgaggacggttctttccctaatttcacggcgaggttgcctgcatctccggttacaaagcctagatcggcgagggttgatctgatctcgttctgaccgttaagtagtagtccctttgttcgtgtgacggcgaaatgtgaatgttctccgttgtgcttatttga

SEQ ID NO: 13553 - DNA, 506 bp, Glycine max
  Coding DNA Sequence Number=SeqID_3774
aaggaagtatctctcatatcaaaagagatgcatccacaaatactgaaaaaactgtcgaatcacttgaagagacaccaaagccaaagaagcagatgcctcaagtacatatgtttgctgcacaaaaagaagtaaagaaaccactaagaaatctaggagaaagaaaatggtccaatgataaactgagaaatggattttcgaaatacatgaagacaatatatggagaaaacaactataacgatccggtttctttggttgttcagacagaaccaggctatgatgagttaagtggacatatgacttcagtttatgaagagagatatttgaaccttctcaatagagaattaagacaaaagaatctcaagagatataatatggataattctgattatcatgatttagcctttgaaaaagagattctggcagccaaatatcacactttcgctcagtatgaagaaaaagattcttctcaacccgaacaacaatctccttctccagaacaaacaatc

SEQ ID NO: 13554 - DNA, 299 bp, Glycine max
  Coding DNA Sequence Number=SeqID_3775
ttcgtcgccgtctacgaaaactctacagctcctcctccgatattcattcaataacttccgcaaaaatgaaggttgtcgctgcgttcttactcgccgttttgagcgggaaagcttctccaaccagtgccgatatcaaggacatccttggatcagttggggctgaaaccgaagatgctcagattgagcttttgttgaaggaagttaaagggaaagactgtgctgagctaattgctgtcggaagggagaagctagcttctgtcccgtgcggcggtggtggtgttgcgatggcttctgctcca

SEQ ID NO: 13555 - DNA, 513 bp, Glycine max
  misc_feature (26)..(26): n is a, c, g, or t
  misc_feature (116)..(116): n is a, c, g, or t
  misc_feature (264)..(264): n is a, c, g, or t
  misc_feature (296)..(296): n is a, c, g, or t
  misc_feature (330)..(330): n is a, c, g, or t
  misc_feature (337)..(337): n is a, c, g, or t
  misc_feature (379)..(379): n is a, c, g, or t
  misc_feature (478)..(478): n is a, c, g, or t
  Coding DNA Sequence Number=SeqID_3776
gaagaacagagcgaagcacgacgcgnggcaaagaaggaggcagagcggagagagagagaatgaggcgcgaaggagcaggagagagaagagcggagagacgtgacagcagagagacnataagaagcagagagtggcgcgcaaacggggagaacagagagagagaaccaagaggcagacgcacagatagagcagagagaaagaggagagacaggcagaaaggacaggaaaaagagcaggaaagcgacagacaacagagagagagcngacggaaagcgcggagaggcgacacagacgcntgaagaagtcataagggatgcgaaggcggcaganaggcagncgaagagggagaagaaagagagagaatcggcgaggaacaaanaaggcgcgagcgaggacaaacgacaatcacaagcgagacaagaacaagaacaacaaacagacacaagatagaaacaagatgaacacacgaagagaagcncggggacagagcatgcaggcaggacaaatagagac

SEQ ID NO: 13556 - DNA, 207 bp, Glycine max
  misc_feature (36)..(36): n is a, c, g, or t
  Coding DNA Sequence Number=SeqID_3777
atttcaaaccaccactcagatccttagacgaagaanaaaggattgttgaaatcgaagatgtcatcatcatcacgtgaagagaatgtgtacatggcgaagctagcggagcaagccgagcgttacgaagagatggtggagttcatggagaaagttgccaaatctgttgacaacgaagagctcacagtcgaagagaggaaccttctctcc

SEQ ID NO: 13557 - DNA, 347 bp, Glycine max
  Coding DNA Sequence Number=SeqID_3778
aaccaactcattattgttatcgtctcaattacacttcgttcatatacttttctttgcctttctagagagttcatcagagatggctggtcgaggaaaacaactcggatctggcgcggcgaagaaggctacatctcgcagtagcaaggcggggctccaattccccgttggtcgtatcgcccgattcctcaaggccggaaagtacgccgagcgtgttggagcaggagctccggtttacctcgccgccgttcttgaatacctcgccgccgaggtgcttgagcttgctgggaacgcggcaagagataacaagaagactcggattgtgcctcgacactttcagcttgctgtga

SEQ ID NO: 13558 - DNA, 431 bp, Glycine max
  Coding DNA Sequence Number=SeqID_3779
taagttttgcactttcttctcgtctcagcgcctcacacccttgtttctttcttctctttctttctctcacaaaaacaaaacaaaccccaacaacaacgcttcttccatttttagccacaacccaatctaccaaaaacacacgtacgaggaaacaggcagcaacaacgttattttttgttttagtgtttgctcttgctttgtccacgtccgttacgcaaaaaggctctaaatagaggccaatgagaacggaaatgaggtaatgatgatttgtgagcatttataagccataaaacaccctccttccttcgttttcgtataacaacgatcgtttccccttcatcttctctccctctattcctctgtttttacgttcttgtcctttttattttttattttattcttttcctctgtccacgagaagagtctcgcga

SEQ ID NO: 13559 - DNA, 447 bp, Glycine max
  misc_feature (39)..(39): n is a, c, g, or t
  misc_feature (227)..(227): n is a, c, g, or t
  misc_feature (245)..(245): n is a, c, g, or t
  misc_feature (327)..(328): n is a, c, g, or t
  misc_feature (340)..(340): n is a, c, g, or t
  misc_feature (378)..(378): n is a, c, g, or t
  misc_feature (403)..(403): n is a, c, g, or t
  misc_feature (411)..(411): n is a, c, g, or t
  misc_feature (415)..(415): n is a, c, g, or t
  Coding DNA Sequence Number=SeqID_3780
gaggactatgtgcatcttgccattatgactcgctgtcgnacgatagacatacacagtgctacatctaagtcatagaggcgtaggcgtacgcaccgatttagcggtacgcaagattctacgaccaaagcccgtaagcgctcatcatctcgtagcaatgtagtgtattcatcacacctactatacaacatgcgcgattgacactatgtcactctcgcatcaacagtccncgaactctcactcacaanacaaacaacccacaccgcagcacaccacatatcactcaagaccacgctcatgctctactcctatataccgcagcacatctcnntccgccgcccancccacacactcgtcgctcctttcctgcgtccctgtgcngggagacacaggcgtcggtgcgtanttgtaatntaanaacatatgagagtattacgtccagtgatgata

SEQ ID NO: 13560 - DNA, 360 bp, Glycine max
  Coding DNA Sequence Number=SeqID_3781
gaagaccggtgcacagttgaacattttaggatatacaacaacgagaacgcttgaacgacgcgcacaggtgtgcacggccacagctaccttgtacgatcgaagcggatccatccagcacagtgcagccgtgcagtatgcatgtgagaccgccgtgctccacgagtccacgtccacggctgcctcgctctcggctcgcaggacacatgcactaatcacccgagcccgcgcgcggcggcaagcaaggggacaacgacgacgcattattgcttgttggcagcccgtgaccccgggctggcacacatgcatgctgccttttttctttttcgcgtccgtgctgcatgctcgtcagtttggccggac

SEQ ID NO: 13561 - DNA, 366 bp, Glycine max
  Coding DNA Sequence Number=SeqID_3782
agggctgctccggtcatctccatggcctcgtcaggccgccgccttagccgtgcgaccatgccacacggccgaccggatggagggagcgtcgcgcctcgcgttggagggcgcggaggtgtcgccgggagagcttgtgcgccgtggtggcgctccgtcggcgagaggagcggcgtatcacgcgcctgaggggtcggagggccatcgccggcctgcgcggttgcgagccgagggccgcggcatcgcctcggtcttccacgccgcgtcgcggagcaccgaggctgccgtctgcgacttgcgcagtgggagggcgtgtagccaagcacaacgccagggccgatggccacggcacgccgagaggagcaccgt

SEQ ID NO: 13562 - DNA, 511 bp, Glycine max
  misc_feature (38)..(38): n is a, c, g, or t
  misc_feature (108)..(108): n is a, c, g, or t
  misc_feature (119)..(119): n is a, c, g, or t
  misc_feature (132)..(132): n is a, c, g, or t
  misc_feature (195)..(195): n is a, c, g, or t
  misc_feature (198)..(198): n is a, c, g, or t
  misc_feature (216)..(216): n is a, c, g, or t
  misc_feature (266)..(266): n is a, c, g, or t
  misc_feature (289)..(289): n is a, c, g, or t
  misc_feature (373)..(373): n is a, c, g, or t
  misc_feature (429)..(429): n is a, c, g, or t
  misc_feature (453)..(453): n is a, c, g, or t
  misc_feature (474)..(474): n is a, c, g, or t
  misc_feature (485)..(485): n is a, c, g, or t
  Coding DNA Sequence Number=SeqID_3783
cggctgcacagtagagtgttggtctgattgtcacttcntcgtcatcatctctaacatctaaacagcatgtaatgaactacgatagtagatatatcagacatcgagtancactatctacncatcgcccgtcgnatgctcatctgacgtctcgtacagatcgctgcacagcaggcactagagacgcgcaagcatgcngtngcacgtcccgacgagatntatggcgtcgatcgatagtcaacgatgaactgaatatgtatagtagaganatgtgacgatatcgataaggaangacgtagcgcacagcacatcagatgcagtctatatcgacatagcgactcacacgacacatcgacgtactcacatcgcactccgncagcgtgtcgtgctagcacactaccacggctgtacatacgtcaactggcacgcgcngcgcacgctatccacaccccacgncatacgccatacgttacccanatctcaataanacataaaacgcgcgacgaggactagt

SEQ ID NO: 13563 - DNA, 539 bp, Glycine max
  misc_feature (491)..(492): n is a, c, g, or t
  misc_feature (506)..(506): n is a, c, g, or t
  Coding DNA Sequence Number=SeqID_3784
agacggcgtggctgtaactgtatcctgcacagcgtatactcaggtctgcttttatcttcgtttgttacgttatagtcggcggggcgtctctgttctcttccgtcctctatcattatgcgtgaggtatagaaataaggtatttttatatttaatgtaatttcttttatataatatactctgtttgcgggttatagattaatgagaggggatatatcacaatgaaagatattggagaggcggtcgcggcggagaaagcgtacgatgagtaaaggaagatgtatgtagatagctaacaataattcttctcgcgcggtaacggtcgaccaaacttcacatcatgtatatgaagagataataagagatgtatatacaacacaataaaaagaaaagcgaacaacatcgcctgtcgtgggaacaacgttgggtgtaccgtggcgtggtgccctcttcgtgggcgtcgttattagtgctatttgaccagatagaacatnntaaggggggggaanaaaacaaaaagattgtattgtgtgtgtaaccaa

SEQ ID NO: 13564 - DNA, 423 bp, Glycine max
  Coding DNA Sequence Number=SeqID_3785
tgcaatagcggcgaatctctctcaggacttgatcgtggtttctagcttttcgggagaatctgattaaaagtaagatgtctgctactcaggaagaagacaagaagcccggagaacaaggaggagttcacatcaatctcaaagtcaagggccaggatggaaatgaagtcttctttaagatcaagaggagcactcagctgaagaagctgatgaacgcttactgcgaccgtcaatctgtggatttgaacgcaattgctttcttgtttgatgggcgtcgtctccgtgctgaacagactccagacgagcttgatatggaagatggagatgagatcgacgcaatgctccatcagaccggtggtgttgcaaatggcatgtatctgttctgcttctaatgatgttttatggcttttcgctaagacggtgtga

SEQ ID NO: 13565 - DNA, 549 bp, Glycine max
  Coding DNA Sequence Number=SeqID_3786
agaggtgctgtgaactgcctctctctctctctctctctcctgctggaaatggcaactctgcactctcttgcattgtcctctccactctccaactcacttcagaagccacgctcatgtgcaggtaacatcactttttcctatttttctatgaaatgtgcaaagactactctgagattattttagaagtaaagtaagggtgatgaaattaagttgggcaatgtatgtatgttctcctattgaatttgataatatttgtgttaagttagaaaaaaaagtttatttttcttctcttcagcatgcttggggactcaacttaaagggttcatctaaagttctacacctgaaatttcataattacattggaattatttttgtgaggttaagggctttgaatcattttcaactcaatatggtttgcctctgttacgagacactaggcattccaggaggccaaataagattaacaaaaggaggtggcattgttttctttttctatgtttttgccctcttttttgcttgacaacataaaattcctggtatgatgcttca

SEQ ID NO: 13566 - DNA, 573 bp, Glycine max
  misc_feature (219)..(219): n is a, c, g, or t
  misc_feature (396)..(396): n is a, c, g, or t
  misc_feature (417)..(417): n is a, c, g, or t
  misc_feature (478)..(478): n is a, c, g, or t
  Coding DNA Sequence Number=SeqID_3787
cttactggcggctgtgttgctgtgtggtttgtgtcgttcgccttgtacgccgctgctcccacgcggcgctcgcgcttccctcggttcgtgcttctccgctcgcgttaggcgcgcggctccctctctagtaggccgtgccttggcgaactgcgagtagatgtaattacgagcttgctctctggtggcattcgcccgggccgtccctggcgtcgacacgtnttgttggatggttttatgtctgagccttctcgatctctctgtgggggcgctgttcctctccgccgtctcccccctctgggaggtagtgctgatctctcgcgtcgctctcctttgtttatcttctctcatcgcttccgcgcggccggctctccgcttttctcctcccggctttctgtncggtggcgaacaactccttcncccccgtcgcgttgggcgcctctctttgttttttggggattttccgcttcggccccgcgtngtctcccctgcctccccctctcttcccctcgttcccgacggggtggggccgggcccctcaattttctgtcctgttggtctgtggctctcctcatc

SEQ ID NO: 13567 - DNA, 503 bp, Glycine max
  misc_feature (34)..(34): n is a, c, g, or t
  misc_feature (88)..(88): n is a, c, g, or t
  misc_feature (91)..(91): n is a, c, g, or t
  misc_feature (152)..(152): n is a, c, g, or t
  misc_feature (162)..(162): n is a, c, g, or t
  misc_feature (216)..(216): n is a, c, g, or t
  misc_feature (220)..(220): n is a, c, g, or t
  misc_feature (236)..(236): n is a, c, g, or t
  misc_feature (244)..(244): n is a, c, g, or t
  misc_feature (323)..(323): n is a, c, g, or t
  misc_feature (413)..(413): n is a, c, g, or t
  misc_feature (431)..(431): n is a, c, g, or t
  Coding DNA Sequence Number=SeqID_3788
agaggcacgagcgacgatatatacaacgatctantagtagtgtgcgcagagaagagaaggcagaggcgtgttaggggtggagggcganggnctgctacgtcacacaccgtctcctactccagcccggtaggcgtagagaatgagatagtganagagagtgtntctgtgtgataatgcgtgggagtgtgacattcctactatctctctatcatcacncgcntccttgatgctctatnacatcganagcatcccacgattacacactaacacaccatacaccacacaacgagaaacacacactgaagagaactatgggcgcacanaatcgagaggagaagaggaggagagtgtgctacaagagacactcacctccctcctgcagggtgctcgcggcggagaggtataatcgtggntggggtatgttattcgcnggcgcggcgtgcgccagcgcgcgggtggggggtggcacactacccgcgacagcagcacacaacctctgacac

SEQ ID NO: 13568 - DNA, 457 bp, Glycine max
  misc_feature (113)..(113): n is a, c, g, or t
  misc_feature (125)..(125): n is a, c, g, or t
  misc_feature (166)..(166): n is a, c, g, or t
  misc_feature (171)..(171): n is a, c, g, or t
  misc_feature (205)..(206): n is a, c, g, or t
  misc_feature (219)..(219): n is a, c, g, or t
  misc_feature (276)..(276): n is a, c, g, or t
  misc_feature (280)..(280): n is a, c, g, or t
  misc_feature (282)..(282): n is a, c, g, or t
  misc_feature (286)..(286): n is a, c, g, or t
  misc_feature (339)..(339): n is a, c, g, or t
  misc_feature (387)..(387): n is a, c, g, or t
  misc_feature (405)..(405): n is a, c, g, or t
  misc_feature (431)..(431): n is a, c, g, or t
  Coding DNA Sequence Number=SeqID_3789
gagtagagcgtctgatgtgtcagaagagaggatgagaacggtctacagacatatctatcacttatcctcggctccggcgacgcggaaccgtctcgtctgtatgtcattgtganctcgctcctacnacgcaagactcacataaagacgataggtgctcttgccgagngatgnggggagtgcatgagtgcaggagcggcgtgcatannagcgtgagcagcntggcggggatggggtatgtggtggtgcagtacactatacagggcaatactcgatganagananaganaggacacaaaggagagcgacgagagcatcctcctcctgctcgccggcgcgcgnggagagggcgatggacacaacaaggattatgtatgaggatgggcgtgncgtcagctcaacaccacnacagggaggaagaagcagacaaacancttattacctgcggcggatagatacg

SEQ ID NO: 13569 - DNA, 474 bp, Glycine max
  Coding DNA Sequence Number=SeqID_3790
agaggagctgctcaagcccatctggcacgccttcactgccctggatgtggataagtgcggcaaagtgtccaaatctcagctcaaagttctgtcccacaatctctgcacattacttaacgtcccgcatgatccggtggccttggaggaacattttggagataatgacttgggtccggtgtccaaccaggggtacatgccttatctcaacaaattcatcctggacaaggttcaagaaggtttcaacaaagtggaatttaataagatgtgctggacgctgtgtgcaaagaaacacctccccaacacccccctgtacatcagtgaagacagcgccttcaaagtgtggaccatattcaattacttgtcagaagaaaaattcccactggttattgtgcccgaggagatcgagtacttgctgaagaagctgactgaagccatgggaggaggttggcagcaggccctgttcgaggactacaa

SEQ ID NO: 13570 - DNA, 555 bp, Glycine max
  misc_feature (53)..(53): n is a, c, g, or t
  misc_feature (55)..(55): n is a, c, g, or t
  misc_feature (107)..(107): n is a, c, g, or t
  misc_feature (153)..(153): n is a, c, g, or t
  misc_feature (201)..(201): n is a, c, g, or t
  misc_feature (297)..(297): n is a, c, g, or t
  misc_feature (368)..(368): n is a, c, g, or t
  misc_feature (410)..(410): n is a, c, g, or t
  misc_feature (415)..(415): n is a, c, g, or t
  misc_feature (422)..(422): n is a, c, g, or t
  misc_feature (474)..(474): n is a, c, g, or t
  misc_feature (481)..(481): n is a, c, g, or t
  misc_feature (484)..(484): n is a, c, g, or t
  misc_feature (491)..(491): n is a, c, g, or t
  Coding DNA Sequence Number=SeqID_3791
gagccatgcacgtactctgtgtacatctgatacactcactcgcccgcagcacncnactcacatactacgttactcactcatatatgcatgacctatacatactatanatctgacattgtgtatctcgtcgtgcgcattatacacttacagctnactccgtgtgatgacgtgaatgatacgtatacactgcgactctgtgcntcatctctgctagtctctgatgctcgtctccgcgacatcgatcatatgctctatattgacggtatatgatcacgtgatattgcctcatgtcataangaccactgaacagtgcggctccttgctcaatgagaaagtcactgatacgtcgcgctgtgctacgctcatgnatgcgcctatgtatgtcgctgcgatcgtctctgctactctcngctgngacactngtatgcgtctgcgcgcacgtagatgatcatatagcataatgacatgctattntcgccgntgntaagctngcctacgaacgactcgtcgtcgctacgacagtgacagcaggttcatcgtatatcagtcatcatc

SEQ ID NO: 13571 - DNA, 310 bp, Glycine max
  misc_feature (155)..(155): n is a, c, g, or t
  misc_feature (160)..(160): n is a, c, g, or t
  misc_feature (174)..(174): n is a, c, g, or t
  misc_feature (177)..(177): n is a, c, g, or t
  misc_feature (184)..(184): n is a, c, g, or t
  misc_feature (217)..(218): n is a, c, g, or t
  misc_feature (228)..(228): n is a, c, g, or t
  misc_feature (236)..(236): n is a, c, g, or t
  misc_feature (242)..(242): n is a, c, g, or t
  Coding DNA Sequence Number=SeqID_3792
cgtgggggcgagaatcccctattctctcccaaggttggggaaaaggggttttcttcccaaagtaacggggtttaataaccccggccttctttctggataaacggaacccccttccctttgagccaggaggcccggagccaatggttacctgctcntgacnataaccagttctgncgncgaaagnaagcgcttctcggcagcgatgatgtgatcgtgnnaagtggaatncacgaggnccagancctggagctgcttctgtggttttggaggttactccgacgtcgttcttggtttctcttccgccattata

SEQ ID NO: 13572 - DNA, 393 bp, Glycine max
  misc_feature (213)..(213): n is a, c, g, or t
  Coding DNA Sequence Number=SeqID_3793
agctgttactcgatcaattttctgataatggcgttgaacaccggaatcagatcgatctcaaagatcatagcttcatccgagtcattagtctccagatctgtgagcagaagcttccactcgactggagctaagaagatgagcggagggcatggccatgacgagccatactacctccacgcaaagcacatgtacaatttggaccgcatgaagtancaaggtctcaagatgtctctcggtgtcttcacagctttcagcatcggtgttggagttcctatctttgctgttgtcttccagcaaaggaagaccgcatctggttgagttgagtctctcttctcagcttgaataatatttgtatgggaattttcaaactctgcctctgcaaggaaagttctt

SEQ ID NO: 13573 - DNA, 567 bp, Glycine max
  misc_feature (328)..(328): n is a, c, g, or t
  misc_feature (447)..(447): n is a, c, g, or t
  Coding DNA Sequence Number=SeqID_3794
gcgctctgcgtgatcacggtatatacaggatgtgcttggttcagggtagtagaattaactatagatatactatcatatcctgtagagtgattttgtgatgcatactgcgtgtgtgtatatgagcgatggtgtgcgtgacgtgggatgtgattgaggattctagaatgagcgtgtcagtggtgctggttacgcatggtgagtagctaggtggtgtcagcttatcaatcatatgccgagagtacaacgttgtcagccacggcctagtggatgttatgtcggtatgtgaggcaatgtatcgacgcgagcgcgtgtggtgcgatagtgttangcgtgtgtctcgtaatatactcgtatctgttctcattcgtgtgtatgtgggtgttgatgctatggacagttgtatatataaaatacatatacacacgagcagatcagaatattatatantcttatattctcgtaacacacgaacgttgcatagctctgtctgtaatgtggtgtgagttgtcgacgcggtgtgatgacgcagtatttgcgagaggcagtgtagacactgcgtgttggtgt

SEQ ID NO: 13574 - DNA, 387 bp, Glycine max
  misc_feature (296)..(296): n is a, c, g, or t
  Coding DNA Sequence Number=SeqID_3795
gacagacagctttatcacaagagagaccaaaccaaactgtgaacttttgtctgaaaaaacaaatgggaagccaaggaggatcgatagtgaggaaaccaaggtttctatgtctccatgggttccgtacgagcgcagagataatgaagatacagctacacaaatggcctaaagctgttatcgacagactcgatctcgtgttcctcgacgcgccttttccttgtcaaggcaaatctgatgtcgatggagtcttcgatcctccttactacgagtggtttcaattcaacgaggagttcatngagtatgagaatttcgagaactgtctggagtatttagaagatcgtatgatcaagcttggtccctttgatggtctcattggcttctctcagg

SEQ ID NO: 13575 - DNA, 568 bp, Glycine max
  misc_feature (231)..(231): n is a, c, g, or t
  misc_feature (315)..(315): n is a, c, g, or t
  misc_feature (372)..(372): n is a, c, g, or t
  misc_feature (516)..(517): n is a, c, g, or t
  misc_feature (524)..(524): n is a, c, g, or t
  misc_feature (528)..(529): n is a, c, g, or t
  misc_feature (536)..(536): n is a, c, g, or t
  Coding DNA Sequence Number=SeqID_3796
gctatccttgcatccaggtgacggagaaagctccttaatagaaggctagagtagtgcctcatccaccgctgccgtgggtgtctgaataggctcgtacatgcgtgagcctgcgccatctctctccagtcacagtaacggctatgtttgtcctcttctagcgcgcgtgagcacgcaggagatccatcgactaccccgcgcattccgtcttggcgacttagcgttagtggagtngaccaatccgaacgaagcagccaatcacccgattatgcgactcctttcgctctatctgcgagctagagagcgccgcctgctcangctggaactctctactgacacaacatatgacgatgtaggcatatgctatcctgagangcgtcttgtctcgggctcaccatgcacagacaacatggacgaggacgggggagcggcggtgggcgcgctcgctcattacacctaatcctccacctagagagggggacgcctctcgcgtcctctcccttctagtgttcggcctcnnaaagagnaagnnatattgnttaatatttatcctctctcgtttacgaagtga

SEQ ID NO: 13576 - DNA, 467 bp, Glycine max
  Coding DNA Sequence Number=SeqID_3797
agatgcctgcttatcgggttcctacatcagttgtgtctgaagccctacctaagacagctgatggggcgatacaggcgcatcggaatcaatgtcaggatacttaatgactgcatgagggtactgatttcattggctatacaagtgtgggttttgcatcaaggttaatttgaattgaactcgagtttcgattgctctaatatcaaacttgtgatgactctatctcaagtgcattttgtgtaaacaaaatatgtgcatgactctcttgatcagaacgaaaacaattaaccaactgatgagtaacaacaaagagctacaagcagcaaagcccaatgtgagtaacagcaaggagttgcaaacagcaaggcccaagaggcaaagccacactcctagtcatttgaaggattacgtattagttgcataatcattcacgtgcgcatccaagttagtaggacctgcacttgtatctt

SEQ ID NO: 13577 - DNA, 452 bp, Glycine max
  Coding DNA Sequence Number=SeqID_3798
atcaccaaatggtacccgtgctttaaatgcagcacacgacttttgggttgtcaggatcaactattgtgtgtagagggagaggcttcatgcaacaggtaacgttgctgctgctgtttctctaaaaaaaaaaagacattttgggggagaaaaatgattgcggataataacgatgatgattgggatggtgaagatgtggtggaagcctatgatgatgatggtgagggatgaaattatcgttatagatgatgatgatgatatagaatcatagattctagaaatgagaggcatcggcaaaatgatgagcatttctcaacgttatgccttatataggaatatatgaagatctaagtaattaactaggatgtcttcgaggaaaatatatatgcaaaataaaacaatttttttagaataaagaaaaggaaaaaaagtgtatcatcttctattaccttaaa

SEQ ID NO: 13578 - DNA, 597 bp, Glycine max
  Coding DNA Sequence Number=SeqID_3799
ttacacaggccactcatttttgaaaaaatctttatgatgaaaaaaaaaaaaaaaaaaaaaaaaaaaaaaaaaaaaaaaaaaaaaaaaaaaaaaaaaaaaaaaaaaaaaaaaaaaaaaaaaaagggccggcccccaatttagggggctcgccccccgggaaataatttccgccccggtccttgagggttaccccttttcccttatagggggctgttttaaacttgggggaaattagggtcatatctgttccctggggaaaaaggttttcccttcaaaattccacaaaacttccggcccgaaagcaaaaaggtaaaacccgggggtcccaaaggagggacttacctctcttaattggggtagccttacttgccatttttctaaacgaaaaccctttcgtcccacgggaattaataaacccctcaccccccggggaaagggttctttccttctggcacccaggggcattttttttttccccagtgaactggccttcagcagttttccttcatcgcccttcccctgaaacattccccccaacgcctccatctttgtattcccaccactcctacatttctttttccatgtggataaacgccg

SEQ ID NO: 13579 - DNA, 522 bp, Glycine max
  misc_feature (403)..(403): n is a, c, g, or t
  misc_feature (438)..(438): n is a, c, g, or t
  Coding DNA Sequence Number=SeqID_3800
taaatacataacacaccactccaattatcacgaaatactcctactagataaacagttagcgaatacgaatatatacatcacacactcatacttcttgatatttaacttcataataatcttcaccatatatgtaaaaatcatcacctcaccctacacctcctcaaaccacactaaaccgcgtaccactatgtgagttccaccccaaccgtatactcccaaggctcacaacccgctactcatcacatccatcctcatctctttgcgcccagatccacacccaccccctacagcattacactccaccactctaccgcagtcaccactaaatacatacacacatactcacacctcaaatacatgtaactcttcacaccacaaatatccatatacataatccgccccntcttctctcaattctcgtcgtgttccttccgaccnctgctgcgctatgctctctataaccttcatcacaacacctcaccctctggctatatcaccatctatcgtactctcttaactact

SEQ ID NO: 13580 - DNA, 552 bp, Glycine max
  misc_feature (36)..(36): n is a, c, g, or t
  misc_feature (47)..(47): n is a, c, g, or t
  misc_feature (62)..(62): n is a, c, g, or t
  misc_feature (64)..(64): n is a, c, g, or t
  misc_feature (80)..(80): n is a, c, g, or t
  misc_feature (103)..(103): n is a, c, g, or t
  misc_feature (120)..(120): n is a, c, g, or t
  misc_feature (161)..(161): n is a, c, g, or t
  misc_feature (168)..(168): n is a, c, g, or t
  misc_feature (287)..(287): n is a, c, g, or t
  misc_feature (326)..(326): n is a, c, g, or t
  misc_feature (337)..(337): n is a, c, g, or t
  misc_feature (430)..(430): n is a, c, g, or t
  misc_feature (449)..(449): n is a, c, g, or t
  misc_feature (476)..(476): n is a, c, g, or t
  misc_feature (489)..(489): n is a, c, g, or t
  misc_feature (525)..(525): n is a, c, g, or t
  Coding DNA Sequence Number=SeqID_3801
tcgacgtcgagtgtgtagtcatgcgcgacgtcgtcnttcgcaatacntcatatcgtagtcangntgtgcgctagcgggtngagcagtaaagaacagcatatgnagtgatctatgtatacnataatcataggtgggggggggagattctttcatgattgatngtgatantaatcgagaatgagtcacatgataagaagcatgaatagagatatgagagatcgctcgtcatcgatcagcatgtataaattatctatcgatgatgagtgaaaatcacacatctactctcntgatacaatatgtaaattgtagtgatgtatgatatgtanagatgataagnttatgtgagttgtaacgaatctgccctcctctctctctgcatacagggtagatcagaacgtagtatcagtctactgctagtgagttggatctntgtagtacgtgcgtcgtgncatatgtaatgtatcacaggtgagtanatatatggtcttnctctatttgccgtgctgtgaatctagtatgataganacgataactgccgcgttctttcctact

SEQ ID NO: 13581 - DNA, 451 bp, Glycine max
  misc_feature (53)..(53): n is a, c, g, or t
  misc_feature (57)..(57): n is a, c, g, or t
  misc_feature (93)..(93): n is a, c, g, or t
  misc_feature (100)..(100): n is a, c, g, or t
  misc_feature (107)..(107): n is a, c, g, or t
  misc_feature (111)..(111): n is a, c, g, or t
  misc_feature (128)..(128): n is a, c, g, or t
  misc_feature (137)..(137): n is a, c, g, or t
  misc_feature (142)..(142): n is a, c, g, or t
  misc_feature (168)..(168): n is a, c, g, or t
  misc_feature (213)..(213): n is a, c, g, or t
  misc_feature (221)..(221): n is a, c, g, or t
  misc_feature (310)..(310): n is a, c, g, or t
  misc_feature (328)..(329): n is a, c, g, or t
  misc_feature (331)..(331): n is a, c, g, or t
  misc_feature (337)..(337): n is a, c, g, or t
  misc_feature (355)..(355): n is a, c, g, or t
  misc_feature (368)..(368): n is a, c, g, or t
  Coding DNA Sequence Number=SeqID_3802
aatatcacgtgatacagatagcagtgagagggaccagcgcgtgtgagtcaatnacgntgagacgacatgatctccatcctcactgtgtatgtncgtgttngtatatntatntgctagtcatagtagtntgttgtagngtacnccctgctcactcatccgagcactacngtagtgtcaaggcaggagacgtcggcgagtgcgcgttacttcgcngcgtcttngagagcacgcggtccagtctgctgcgctagtgagcagtgtgatctggacagttgtcgcacatacaccgtcgatacataatctactgtcntgcgtcatcatcgcacannanacgcancacacaccacactacaancaaaaccacaccncctacacagatatagtagtatacacttcacgctctgtgcgcgctgcttagtattggtagtagtcgatgtggtatgggcacaac

SEQ ID NO: 13582 - DNA, 141 bp, Glycine max
  Coding DNA Sequence Number=SeqID_3803
tttctttgtttatctccgcctggatctcgaagaccaaaccatgtccgccgccgacggaatattccgctgcatcttcgaaggctgcatctccggcctcgactccgccatcgagcggcgtccctaccacaaaaactgcgactg

SEQ ID NO: 13583 - DNA, 522 bp, Glycine max
  misc_feature (255)..(255): n is a, c, g, or t
  misc_feature (475)..(475): n is a, c, g, or t
  Coding DNA Sequence Number=SeqID_3804
aattcttctcttcctattgttatagtccacccaaatgacactcacatccacacgctctctcctcatctagcatatcacatcgatattatagttatttatcatgatgtgttataagttgcgcacaatgacccacgactcctatctcattcctacaatctctaactgacactcgagcagaagatgatctttgccacatgaacatacataaactacatacaccatagttatgtcatgatccttatcataagccagagnacccactaccatctactacactatcgcttcttcgacttcttctcatcaatctttattgtcgcatcactctcatttttatctatgtgggcggtaaaaaatacatagttacgcgaatcttctcgtcaactaccacacatgacacaaatagcaacgactcgtcgcctacgggggcgaacaacccaaaacaagacactcacatcaacctcccgcgcgacacccntcctctcctctgaaatctgctgtgatagaataatggccaccgctccg

SEQ ID NO: 13584 - DNA, 226 bp, Glycine max
  Coding DNA Sequence Number=SeqID_3805
ttctttaccttgatgtcctaacaaggatattgtcatgtacgtaagttctccgggaggatcagttacagctggcatggcaatatttgatacaatgaggcatattcgacctgatgtgtccactgtttgcattggactggcagctagtaagggtgcttttctgctcagtgcagggactaaaggtaatgattcttttaccatgagcagtaagggtgcttttctgctcagt

SEQ ID NO: 13585 - DNA, 419 bp, Glycine max
  Coding DNA Sequence Number=SeqID_3806
tctcactccaaaagcgatcgatctatctgaatcggtgaatcatcatctcgtttccgtttcaattggtatgtatacagcttcaatttcgtctccaaaatttccacaagagccttgatctgttgtgtacgtgtacgtacaggcacgtcgtgcttcctcctgacaccgctaagcttctcccgaagaatcgtcttctctccgaaaatgagtggcgtgcgataggagtgcagcagagccgtggatgggtccattacgccattcatcgtcctgagccacacatcatgctcttcaggaggactctcaattaccagcagcagcagcaggagaaccatgctcaaaacgtcctcgctaagtgattctgagttgttgtgcttgttatgtttcttgtaaacatggtttgtgaaccacctctaataactttg

SEQ ID NO: 13586 - DNA, 547 bp, Glycine max
  Coding DNA Sequence Number=SeqID_3807
gtgaatgctaaacagtaccaggcgatacttaggcgaaggcaggcacgcgccaaggcagagcttgaaatgaagctaatcaaatccagaaagccttatctccatgaatctcggcatcagcatgctatgaggaggcctaggggcactggaggccggtttgcaaagaaaacaaacaccgaagtttcacagccgaaacctggagaaaagaacaatgctactcagtccccgacgtcatctcactctgaccaacctgaagcctggaatgatgagtgtagaaaacagtctgaagagatgcaaagctcagcttctaagagaagggaagaagcagactgttcagggcaacaatggaacagcatttcctcaaaccatacttctgaagctcgtctagccatcaaatgacatctccactggcaactcattcttggctctctctttgttggcttatttggtagcagccattgaagagtcccctgtacaaatacttctgtgtttttcttcttttgtgatatgtcaaatgttactgctttcttttgtcaactctctttagcac

SEQ ID NO: 13587 - DNA, 574 bp, Glycine max
  misc_feature (218)..(218): n is a, c, g, or t
  misc_feature (275)..(275): n is a, c, g, or t
  misc_feature (309)..(309): n is a, c, g, or t
  misc_feature (360)..(360): n is a, c, g, or t
  misc_feature (378)..(378): n is a, c, g, or t
  misc_feature (472)..(472): n is a, c, g, or t
  misc_feature (511)..(511): n is a, c, g, or t
  misc_feature (519)..(519): n is a, c, g, or t
  misc_feature (548)..(548): n is a, c, g, or t
  Coding DNA Sequence Number=SeqID_3808
tgtatgagggtaccgttgctgctatggtgcgctgtggtcgtgaagtgctcgaggctgtgttgtgtttggtcgcgattagatatgactgactagagaggtggtgtgatgtagcgcgtaagacgccggaggagacgacgtgccagcgtgcgcacagtatacacacgagctgagcagcggcagtcgatagtagtggagccacgctgacatcgagcgtctcntgacagctgctgatcgtagttgtgtggtgctgtgtcgactctgcgatcgaccacgcngtctgatgcatactttgtggagaccgtggagtgncgtggacggatacgatgacactaaacttacgcacgagtatgcgatcagcgncgcagctactagcgtaangtttgagattgtcagcgcgactgcaatatggcctagtatgtcatagtgctatgcacgatggcacatctattactctactattgtgacgagtcantacgcccttatctctcgcgtgcaatatcgtttcgtcgtngcgctcgngatttttcgtgcttagacggactgtgcgnagtctgtccgacgacagctatacggt

SEQ ID NO: 13588 - DNA, 558 bp, Glycine max
  misc_feature (307)..(307): n is a, c, g, or t
  misc_feature (410)..(410): n is a, c, g, or t
  misc_feature (430)..(431): n is a, c, g, or t
  misc_feature (435)..(435): n is a, c, g, or t
  misc_feature (440)..(441): n is a, c, g, or t
  misc_feature (493)..(493): n is a, c, g, or t
  Coding DNA Sequence Number=SeqID_3809
tgtttaaacacaaccaaggccaccgccacggcgaggagcagtgccctcaccatcccactcctgctccggtccctggcgaagccgtacgcctgccggccggcagacgccggctggcgtgcgccttccccgtcgtcgctggcgtagtcgtcctcgtcacccgcacgacgcttcctagcgtcctcctccatctcctcgtggcgcttcttctcttctgcggcagcggcgtgccgcgcagcttccgcctcgtggtctgccgctgactttgaggcgtcctcgaggggcgtgagcctgggcatgatgacgtggnagacgcccgtcttctccgacctggcgcggatgccgccggcgttgcagcccctcgggaactggacttccttgcggagcgggttcactggccgccctcgagcggncggtcgccgctgaccctcannccgncgtanntgccgatctgcacctcaggtgctccttcttgaacccggggagggtgacgacnaaggtctgctttgcggcgtccttccacgagtcctgcgacggccgaaatccaagtaagtccgtggg

SEQ ID NO: 13589 - DNA, 556 bp, Glycine max
  misc_feature (107)..(107): n is a, c, g, or t
  misc_feature (253)..(253): n is a, c, g, or t
  misc_feature (376)..(376): n is a, c, g, or t
  misc_feature (474)..(474): n is a, c, g, or t
  misc_feature (499)..(499): n is a, c, g, or t
  misc_feature (527)..(527): n is a, c, g, or t
  Coding DNA Sequence Number=SeqID_3810
gtcgcatagcatgtatatctcgcatataataatagtaatcattatgtgtaggctagcgcacgactgcgtcgctagcccatcgacgcatcaacatatctactacagcntgactcagcatatctcgcgtcgcagtatatgtcggtacgtgtgcggcgcacgcagtcgcgtgcactactgtcgatcgatatcatcttttactatatctttcacactacatatacctcagtgcactggcatagcaaagtatatatangatcgaaatacgatgaacatacactcacacatatcccaaacatatattacacactcctcactagattatacatcataacacatcacacactagatatatatatacgactcgatcacagactanatccgatctcgatcatatctattaatatgacgatatcgacgtacatgatcttacgatcagtctgtcacacccacccggtacgtgacacgttgacgcgncgcgccgtcgaccagcacacactcntttactatgctgataatgacgcgcagangcctggctgtcagactatataccgtgtgt

SEQ ID NO: 13590 - DNA, 401 bp, Glycine max
  Coding DNA Sequence Number=SeqID_3811
gtaaagaacaaaccttgctctgcgccaacaagatcagaaacgatttgtagaaccgatgcggcttggaacaaacaatcaaagcaagccggtctcgcctggatattcacaggagaaggaatcaactccaagctggaaggatcaagtacgcaagcgttcgtcaactcccccgatagccgaagctctcgcgatgcgactcgccctcatcaaggcagcgaccccaaagatcttttttctcatcaggatgtcctccgataatcataaaagcaattaacaatgacatgcaggtgaaagaaattcatagaatcgtttgtgatatctaggcaatctgctctgtgttcatagttctcatgatttcaacaaaaatgccgacgcgttagctaagctctctcttagatctgctt

SEQ ID NO: 13591 - DNA, 289 bp, Glycine max
  Coding DNA Sequence Number=SeqID_3812
aatgatttgttctaccccccatgaaagcaaaatcccgctccccctaataaatcaaccttgtgaatctcttaactcgggcctaatgaacccataaaataaacggttctataaactataatcccgcctcccctgttagtttagagtaaatccccccctgagggtttttcttcacgggggggggtttatcctttatcttaaaaaaattgttaattcctattaagagtaaagaaactatatcctccgagataaattgatgctaaaaaggagctacccctaattatctgttttt

SEQ ID NO: 13592 - DNA, 550 bp, Glycine max
  misc_feature (60)..(60): n is a, c, g, or t
  misc_feature (72)..(72): n is a, c, g, or t
  misc_feature (97)..(97): n is a, c, g, or t
  misc_feature (103)..(103): n is a, c, g, or t
  misc_feature (105)..(105): n is a, c, g, or t
  misc_feature (107)..(107): n is a, c, g, or t
  misc_feature (184)..(184): n is a, c, g, or t
  misc_feature (331)..(331): n is a, c, g, or t
  misc_feature (333)..(333): n is a, c, g, or t
  misc_feature (371)..(371): n is a, c, g, or t
  misc_feature (404)..(404): n is a, c, g, or t
  misc_feature (416)..(416): n is a, c, g, or t
  misc_feature (429)..(429): n is a, c, g, or t
  Coding DNA Sequence Number=SeqID_3813
cgtatttctgtcgtcattgtgcaatatatgtagcatcagtgccgcatgcgctgagatgcngttgtcagcaantcccgactcgtgtcagtatccgcgnctgctngntnctgtcaatgctacactctcgattacctgcgagatgcatttcctcaggtacatgatgtgcgtgtgacgccatctctantatctctgacctgttatcgtcgtctcacgatagcgcctatgacactctctgcgtcaatcctatatctctcatctgtactgcacgcctctcgttcgcatactatacactcgtgctcgtgggtcgcgactttcgtgtcgcgaatgcttncngcgatgtggcacgacgcatactggctcgaccgcgatcntcgccacatcgtctactcgctcacacgcctgancgcgcgctcgancgctcatcgcgangcgcgcggaccgcgtgcaatcactcgctaacttgagtgaacagcgtgactgctgctgcaggcgcgatgtctacgtcgatacgacagactcgcgagcatctggtcgcgcacaaactgcatga

SEQ ID NO: 13593 - DNA, 514 bp, Glycine max
  misc_feature (26)..(26): n is a, c, g, or t
  misc_feature (28)..(28): n is a, c, g, or t
  misc_feature (106)..(106): n is a, c, g, or t
  misc_feature (455)..(455): n is a, c, g, or t
  misc_feature (474)..(474): n is a, c, g, or t
  Coding DNA Sequence Number=SeqID_3814
caagacggtaggatgactattgcganantatagtcaccaggtgcgatctatatacctaaggctgtgtcgacgcgcacgctgccgccaggcgcgtgtattaccttantaaatactataacccactagcatctatatatacaatccgatataacatatatttatctcatagaggtaactatgtgtcggtgtgtcttatttattaaattaatcgccacaagccaaagtgtaacatagtaatcgccgccacagggatattattataaataagatacaactcccaggggatgacttacatttgtcctacgcataacgacgtactatcatactgtggtgtgtggtgacaagaagtagatgcccaccacacgtacccccgtgcgtagtgcgagcgcggagacgagaagattgtgctacaacatagcagataatattataatagcgcggaccgcgggcctctnatgatatagataaggcccnggtgagggaggaggcgccctctggtgcacacaaagttcgt

SEQ ID NO: 13594 - DNA, 216 bp, Glycine max
  Coding DNA Sequence Number=SeqID_3815
ggaagggagcactcgcagagactacggattcaacccattcgaactagagaagcccgccgagtacctgcagttctagttggactcgctggatcacaacctagctaagaacgtggctggggacatcatcttcaccagtaccgaactcgcgtacgtgaagtccacgccgttccagccctacagcgaggcgttcagactgcacaggctccgcgagtgcga

SEQ ID NO: 13595 - DNA, 540 bp, Glycine max
  Coding DNA Sequence Number=SeqID_3816
ttcgcgctggtcttgatgtagtctctggtttacatctctggttttatagggtcgtgtcacgggttcgtaggtcgtcaatcgacgataactttccggctgcgctatgctttctcttctgcatcccggcttcagtcagtggatgtgaatgcttactcagaggtggcgcacaattagcaaaaagtgtatgtttttatttttctttttttatattatctattggagtaaaaagcggtcgatgacatgttagtgcctaatgaagtttctcgtaggatgaggggtaccgagatagagggcgggtagatagtgcgtgtggagaggacgggggaggaggacgtgttacagagggccgcgaggtcaggcgcgaaggtcacttatcgagtcgacgtgctgtctgattgagtcgtcgcatcgctgtgtcaaacacttgtgctttcatcgagtaacaatgctggcgaggtggcgagatactgtgcgcgagtcctactctcttgtgctcagctcttcgacacatatatatacgttcggttgcgacaggttcaa

SEQ ID NO: 13596 - DNA, 578 bp, Glycine max
  misc_feature (60)..(60): n is a, c, g, or t
  misc_feature (324)..(324): n is a, c, g, or t
  Coding DNA Sequence Number=SeqID_3817
aagcaatagtcgcatccgctatgtgccgtacactccccagactatcctagcacatcaccncccctcacttccctctcaccaaacagtccgagtctatgatatactaaagatgaaaacggatatggagaaatatgaacgtgtgaagccgtgtccgtcctacactcaatacatgttggatgatagtccactatctcccacgccagtgtctagatcacaattatatccattatatcacattagtacacaagatgccactccctcaccctctcctacttcctaatatcgtccttgtcagcgtacgacaattaataacctaggatgagngatcacattatatactatcgatttctctatcgtccgcgcatttgatattttaagtatgctattgctattggtattatgatgtgacttccctctttcttcgttgatacgcgttcttcatcccaatgtagagcatctacggttctttatatatcatatctcaccattcgctaatatcatacttaactactaatacgacattctcatatgatatacttctgtgacttctctcactttcattatgcatgtccactacc

SEQ ID NO: 13597 - DNA, 396 bp, Glycine max
  misc_feature (185)..(185): n is a, c, g, or t
  misc_feature (315)..(315): n is a, c, g, or t
  misc_feature (317)..(317): n is a, c, g, or t
  misc_feature (321)..(321): n is a, c, g, or t
  misc_feature (335)..(335): n is a, c, g, or t
  misc_feature (338)..(338): n is a, c, g, or t
  misc_feature (367)..(367): n is a, c, g, or t
  Coding DNA Sequence Number=SeqID_3818
ggcacatgaaatcaaattacagtttcagcaaacaattgtgaacaaatatctctttcctcccgtctgtttccatttaataattcattaaataaacagggcacatatcatggtatcattgtcttccttgattgaccaatgttctaaattccaaaagccaaagttccattttttttttctttctccanagcttgtaagcaattttccttcaccttctaaacaaaaacaaacagacatctcccgctgattttaatacatataattaaaataatatcatccttttcaagcaaggcaaatcatccttttgtcacgttcaananaaanatttgactcccgcnaanatacttatggtatctaaaaaaaaaaaaanaaaaaacttgctcaccaaatgatcatcta

SEQ ID NO: 13598 - DNA, 355 bp, Glycine max
  misc_feature (92)..(92): n is a, c, g, or t
  misc_feature (137)..(137): n is a, c, g, or t
  misc_feature (144)..(144): n is a, c, g, or t
  misc_feature (148)..(148): n is a, c, g, or t
  Coding DNA Sequence Number=SeqID_3819
tcatttttcctctcaacacgttatcagcacgctctttcctgagcgactcgcccggtggccggcgcggacggcaacatctctgcagcggcagngatgacaaccagatcgggaacgcagccctacaggagcatgtgcangtggagntggntcgattgctgccagatcagggcaaaaccaatggatttccatcgattcaaggattgaaggcaaattaacaaacccaacgatgcaaagggaagaaggtacaattgttttctatttgccttgcgcggaataatgcggccgttgcatccatcaggcacagccctcggcctatcttctcgtgaattccaattcgactcgacaaggcgatgtt

SEQ ID NO: 13599 - DNA, 535 bp, Glycine max
  misc_feature (45)..(45): n is a, c, g, or t
  misc_feature (53)..(54): n is a, c, g, or t
  misc_feature (64)..(65): n is a, c, g, or t
  misc_feature (174)..(174): n is a, c, g, or t
  misc_feature (316)..(316): n is a, c, g, or t
  misc_feature (380)..(380): n is a, c, g, or t
  misc_feature (402)..(402): n is a, c, g, or t
  misc_feature (453)..(453): n is a, c, g, or t
  misc_feature (502)..(502): n is a, c, g, or t
  Coding DNA Sequence Number=SeqID_3820
ttgtggttgatgtagaaccccgcccccctctggtcgcccccatanataagaannaaaaaaaaannggggtgagaagaggtggtgctcacatccacacgtgcgctttgtgattcttctacacactagcttaagtttatcaactattatgtatctttatctgacacgtctccttantgtattatatctccttcctccttctacaccatataagtgatatgtccttctcacttgataaacagcttcctttcgcatactattatattgcttctctcactctatactggtcgtgctgcgctctctaccacccgactcttgnatctgacctgagaatatatgttgtcgatcgatgagtatctatattattagattttgagtgtggntgcctctgcgacctaaaacaanctacgcttatctcgcgccttttactaattattgtatatactctcactctgncagatgtgactgagagacgacatgatcaatactactctgtctgtatgcnatctaaacacaatactctacacatcacgcggta

SEQ ID NO: 13600 - DNA, 390 bp, Glycine max
  Coding DNA Sequence Number=SeqID_3821
gagagctttccaagtttacatggttgagctagacatccaggtaccattagcatatgaccctttcgcagaagctcaagacacagatgcaccagggacaaaagagtatatccacgtccgtattcagcagaggaatggtaaaaagagtttgacgacggtccaaggtctgaagaaagagtacagctacgagaagattctcaaggatcttaagaaagacttttgctgcaacgggaacgttgtgcaggacaaggtgctaggcaagatcattcagcttcagggtgatcagaggaagaaagtttctcactttttggttcagactgggattgctaagaaggatcagatcaaggatccacgggttctagaattcggatcgttcggttttatctttctctt

SEQ ID NO: 13601 - DNA, 322 bp, Glycine max
  Coding DNA Sequence Number=SeqID_3822
ggtacccctagagatgctcactgggaggatcggcatctgctgagatcaggagctgttagaggtacagatgttcagactgaattcgacgatgatgaccaacacaaagttgttcttcttgttcatgatacagagcctactttccttgatggcagatttgtttttactaaacaggcaaaccctattatgccatgaacagatccaacctctgacctggatattatctctcatacaggatctactcttgttagagaaatccatgagaagcttactatcaaccagtctcgccaacgcttgagggaacttgctggctcataactagacg

SEQ ID NO: 13602 - DNA, 588 bp, Glycine max
  misc_feature (169)..(169): n is a, c, g, or t
  misc_feature (264)..(264): n is a, c, g, or t
  misc_feature (292)..(292): n is a, c, g, or t
  misc_feature (436)..(436): n is a, c, g, or t
  misc_feature (438)..(438): n is a, c, g, or t
  misc_feature (448)..(448): n is a, c, g, or t
  Coding DNA Sequence Number=SeqID_3823
gaggaactggactacatatagtggagtatgggatggtgggttagagggacgaaactaggaacggtgacgcgagccggaggagggtgtgtgtatgatgtatacgatgtgcgagatgatatgatgcacggagtattcgctcgacctaggtcagctcgtgattttgctcgcngccagcatgacttgtgtgtatgaccacggcgagcaggacggcgtgaggaaagtacgcggtctaatctattagctatggggagtggagtatagggngaggagggtatgcgagagagtatgagangtggggtgagtggagaacgagacagagaattgaggtgggggagagagtgaagcatatggtccacactcccgtgatagggagatactctggtgagtaggttgagtaacaagatattaattaagcagttatccactccttgtactncngtctggcacncgcggggaggagatacccaagtatatgttcaatgagggcgccctcgcctcacgccccgcgttgcgaggggagacacacgtgtatatttaggtgggtgggggtgatatcgcacgtacggacgacacgctgtacaagagggt

SEQ ID NO: 13603 - DNA, 358 bp, Glycine max
  Coding DNA Sequence Number=SeqID_3824
ggaactccagtgaaagtggctgctttggctttggcattcaggagcatatcgatttgggagccaagtaggatccttcacctggtatatatggaagggacttctttgttgttttggggcgtcctggctatcgtgtgggaagtccccaaaggtgcaagtcccgtgttggaatccagcaccgtgtcccaaaggaggatggtatcaagtggttccaggtgaaaaatgagggagtgatcctcaacaagtcccagcccattgtttagttagactgagttcatttcaggggggggtttttatcagttttgtcaactatttttttgggaaagtatcttaattttgagccaggttaggaaacaatgtt

SEQ ID NO: 13604 - DNA, 562 bp, Glycine max
  misc_feature (162)..(162): n is a, c, g, or t
  Coding DNA Sequence Number=SeqID_3825
ggctactttgccatatgctctcgcaccgcgcactatctcactcaatctgtagctccacgaccgccccttgtccgcacgttatgtatcctgctctcatcactctcagacgcctatctgtgactcggagtgtgttgtttgcctgcatatcaatactatataatngtctgcggtattacggaggtgtgtcacctgtgggagcgtgggtggtgatgacactcgcggcggtgcgtgagttctcttctcccgccgctctttcattctcctcctaaataataatacccggttcgcgcgctcatcgtcgtctcccgccatcaacaaactctgcttcgtctttcggctcctgggccagcgcgcaacactgtccacacacgccctcaccgctaccgcgcggggggcggaccacacgcaaacatcgatcaaacgccggcacaggctcgtttaattttctatcacttagtggcgccattatgcgggcaaacacctgcggtggtggcctcctcctctttttggtgtattctctttgggtgtgtgctccccgcgtttgcgcactatttatcatgga

SEQ ID NO: 13605 - DNA, 369 bp, Glycine max
  Coding DNA Sequence Number=SeqID_3826
aaggaggctattgcagccgccgccgggagaaacaacgggctgcggcgacaacggcaagcgcaaggtgggagggaggccttcagccctattttcatcatcctgctggaagggaccgtttaatgcatgaatacagagcgagctctggcaatgaatcgaagccagagattaccttgatggcgcagcatgagtcgaagtgtagtatgtactttatttcgtattgaagaacctgacgatgtagtgtagctacgtggaaactatgtttwaacgccccctatcaattagttggtgcagactgaagaatttgcaacacacctgagaatgtaacmctgcaaatagtgcggccagagactaacatgatgctgcagcagg

SEQ ID NO: 13606 - DNA, 547 bp, Glycine max
  misc_feature (193)..(193): n is a, c, g, or t
  misc_feature (204)..(204): n is a, c, g, or t
  misc_feature (319)..(319): n is a, c, g, or t
  misc_feature (332)..(332): n is a, c, g, or t
  misc_feature (359)..(359): n is a, c, g, or t
  misc_feature (383)..(383): n is a, c, g, or t
  misc_feature (391)..(391): n is a, c, g, or t
  misc_feature (399)..(399): n is a, c, g, or t
  misc_feature (436)..(436): n is a, c, g, or t
  misc_feature (473)..(473): n is a, c, g, or t
  Coding DNA Sequence Number=SeqID_3827
atatgttcagatgcactcacgtcatatcatcaatgatcacagactcacacatctcactactagcagtctagtatatatacgactagacatataccgcgcactacgtgatcgtcaagctgcgtcatacctgacactacgtatcctccttcacatatagtgtagtatagactgacaagcaacgatacctaactcntctatactaangacaccactcataacataaaatacgtctcacccatctctactctctctctcatcacacccacatgccactcacaccactctctctctagattgtctctctcttaatatacacgcncatagtaagtacncatacgactctcgcacatccagcaggnctatcgggcatctgcgacatcatngcgatcanggcacaangagacaaggaatgtgacagtagaggcgacgcagatanatgacgagagatagaagtgctatcacagatacacacnagaggaacagcctaccagacaggcggccgtatcaaggtcgcacgcgtgcgagacacacggcactggacacacac

SEQ ID NO: 13607 - DNA, 217 bp, Glycine max
  Coding DNA Sequence Number=SeqID_3828
cagagagagagcagtcgagagacagtgagagaaaaaaaactcatcaaagagaaatggctacctccgccgcacgtcctctcgtcaccatccaaggcctaggcggcgacatgaccaccgaccaatcctccaccatcgtcctccccgacgtcatgacggcccccgtccgccccgacatcgtcagcttcgtccacgctcaaatctccaacaacagccgcca

SEQ ID NO: 13608 - DNA, 288 bp, Glycine max
  misc_feature (58)..(58): n is a, c, g, or t
  misc_feature (115)..(115): n is a, c, g, or t
  misc_feature (207)..(207): n is a, c, g, or t
  misc_feature (229)..(229): n is a, c, g, or t
  Coding DNA Sequence Number=SeqID_3829
aataggccgggcttacactccttgggctctccattaatagggatatggtggtgtccanaagccctggaaattctggcgcccccatattaataaaggaagggtgaatttaaggggncggcctttacccaatggggaagaagtataggctttggttacccctccagctcaaaatactctttcaaaattggagcacacctggatggttcncacttaacctacctacacgggnaatttccttgtaacgccaggaatgaactggatatgcagggcctattttgaagaaagaac

SEQ ID NO: 13609 - DNA, 366 bp, Glycine max
  Coding DNA Sequence Number=SeqID_3830
atgtccgaaagccacttcgacgaatacgagcactacaacttcagccacgacaagcacattttcaccggccacagcggcaaacaaaggaccaaaaaagaggtcagcgcccactcgaaccaccacgacccgagcggacacacgaggaagatcgtcaccaagatggtcaacaccgagagcaaccgtaaatcgaagcactaaattcaattttgagctcataaaggattgccgtgtcctgttttaaggacgaagacgactggttttgtttatcaaggactgtgatttcggtttagacgagtcaccttggccgcgcacgcgatcgatcccgcaggattttgcaaggtgacttacacgctttatgttttacga

SEQ ID NO: 13610 - DNA, 308 bp, Glycine max
  Coding DNA Sequence Number=SeqID_3831
attctgcactcacgccggaagtgattcctacgaggacgacagtgattatgctgaggcagatgaacactcgccgtgtgaacaagctccgtatcaagacgtgactagcaagtactttgtggacaatggcagtgacagggatgattccgatggccaaaaccgcgttggagggcacgcaaaatataagccattctagggagatgtatccactggttggccaaatgtagaatgccatcaaaaaccatgggactggttgagttttctaaaaaactttgaaaggaataacaaaccctctgtgaaaggccaggcag

SEQ ID NO: 13611 - DNA, 405 bp, Glycine max
  Coding DNA Sequence Number=SeqID_3832
ttcatccatgaagtgtttacaagtcccaacatgattgagcttcccattatcggatcaatgcacactttcttccacgaccttctcaacgacacgcacgcctgcacccacaccaacacctgtaaccctcccagccccgatttcttccacactcacacgagctaccatgtccacaccaaaatcgtgcccgcccctgaggaggaccatgtcgccacctatgacaccgccaactccgccgaaaacaattcgtcgtcatccaacaagcggtctctgctgaacaaataggccgtcctgaaataccgtgagaataataaggcgcgtgctgcgtgactagaagacgatgttgtgaatttgatggctctgaaccagcacttgatgaacaagctgaaagggcatgccgctttcgaa

SEQ ID NO: 13612 - DNA, 416 bp, Glycine max
  misc_feature (104)..(104): n is a, c, g, or t
  misc_feature (189)..(189): n is a, c, g, or t
  misc_feature (258)..(258): n is a, c, g, or t
  misc_feature (283)..(283): n is a, c, g, or t
  misc_feature (303)..(303): n is a, c, g, or t
  misc_feature (366)..(366): n is a, c, g, or t
  misc_feature (369)..(369): n is a, c, g, or t
  misc_feature (372)..(372): n is a, c, g, or t
  Coding DNA Sequence Number=SeqID_3833
gatggtagtgctatcttcttcttctcataccacgattccacatccgacatctcatagcttttctttttagacatggccaaatcacttttcttttccttcttagncgtctctcttctgcttcttcttgcagcggcttcggcaactgcagctgcagggaacgccacaagtgggttgagatatggcggatgngctctcagagacaccattggagaatgcataacggcggagattgaggaggatgggagttgaggatgtggngcggcggattctgcgacaacagggngaggaacttaggctactcanctctgcaggggcagaaggcagcttataaatgtaagattgctgggagttgcatcgggaaaaagntantcngaaaaacgcagcttgcacttacttcaccagatgcaaacgcggcc

SEQ ID NO: 13613 - DNA, 584 bp, Glycine max
  misc_feature (494)..(494): n is a, c, g, or t
  Coding DNA Sequence Number=SeqID_3834
attcctccgcctgtatgatttagataagtgaataccccactactaacaccctcacaaaatatgaagtatatatataaatatcttagacacccacaccacctacttctcgaccctctctcccatgacagactactgctcaaacgtacacggtctcttatacacctctccctgacgccgtattctccacctccactcactcattctctagacgattctcccgcctcttattcactcctcgctcttctaggaatatggcgacacacatcccacgcctaagcgtagctagcttattgtagcctaccgcttactctctcctcatctctgctcttcagttaccatgcggcctcactttctatcctacacgacctcagtagcatcagctggcagcgcatcaacgacactaccaccgcttctgcctctccttcctatcgtgcatggcttctaatgcacgcgggtctcattacatcttatatatctatatattttgtcaccanctcagaactatcactccttctggagcaaacacactgcagaacgcccataacttatcacggtacccatcgaagctcacactaatctccatc

SEQ ID NO: 13614 - DNA, 365 bp, Glycine max
  misc_feature (312)..(312): n is a, c, g, or t
  Coding DNA Sequence Number=SeqID_3835
aattagtcctggctgagtttagcagactagacagtatagctaagctagggtcgacgacactggtcatggccatggagtacacctcaaggcgctggctggccgcggtggcggccatcgtcctgctctcgtgcgccccggccctggcggcgacggccggccggaagctgctgcagatccagatcagccaggcgcagcagtacgtggtgccgcagaaccacatgcgcgcgatccacgagcagcgcccgctcaagtggagcagcgggctggcggaccaggcggagcgctgggcggcgcggttcaagggcaactgcncggccgcgtcggcggcgatgccgggcggcgtcaatgtgtttcgcggcttcggc

SEQ ID NO: 13615 - DNA, 402 bp, Glycine max
  Coding DNA Sequence Number=SeqID_3836
ggcgccgcagaggagtcgcgacgagggcttcttcctctcagttatatcaaagacatggagcacaaggagaccgcctgccagtctcgggaggggccccctccttttcggcaacaattgtggcttcttctgcggcggggcgaccatgaacaagttgtccaagtggcgccaggagaaggcggcgaagcaggagcaggcgaagctggccgcctcctccttcgacaacatcgtccacggtggtggtgccgcggaaaaacaacctgttgctggcggcacggcggtggcggttgctccccttgaggcggagacgcttattaccgccccgcctgctgataatgccgggccccccgggggggcggtggtggagccccaaagggccccaccgcggcggaacctgcggaaaga

SEQ ID NO: 13616 - DNA, 553 bp, Glycine max
  Coding DNA Sequence Number=SeqID_3837
atagatgcgctgcatcatggcgccgcgcccttatggtcaggcgtgggagtgtgttgtcggttgctcatatcgcttatgttatcgcatggctgggtttgactgtctgtgtagtcgtgtgatcccggtagactagtaatactagaggaaagatatagtgttgagagatggaaagcggcagcgggagggggcgaacgggggtcgcacgtgggctggcgccgatcctgactggacgacggctgactacacacacacacgcacgaaaggaacggaagaaatagaagaacgcagcaacagaaggaggcgcagaaagcaggagggcgtagcggagcttggatgcgttcgctacgcatcgctcccacggatggtcttttgtctgcaacactggattgaggtgatggtgagggtgggcgtgaggggatgcgcttgactctgctatgcagtgtccgcatctgccacaggtggtgcacgccaacggcggaagcctcaggcactcgtgagctgatggtgacggagtgtgtaacgtagagtgttgagcgactgacggctgagacca

SEQ ID NO: 13617 - DNA, 538 bp, Glycine max
  misc_feature (31)..(31): n is a, c, g, or t
  misc_feature (66)..(66): n is a, c, g, or t
  misc_feature (76)..(76): n is a, c, g, or t
  misc_feature (125)..(126): n is a, c, g, or t
  misc_feature (135)..(135): n is a, c, g, or t
  misc_feature (144)..(144): n is a, c, g, or t
  misc_feature (161)..(161): n is a, c, g, or t
  misc_feature (457)..(457): n is a, c, g, or t
  misc_feature (492)..(492): n is a, c, g, or t
  misc_feature (511)..(511): n is a, c, g, or t
  Coding DNA Sequence Number=SeqID_3838
cgattcagaactcgcgcgacacaagcccagntcataatagagatgtgcctggctgttcctcactcntctctactcngcatctctctcttttcctttcttatttaatagtactatacggtcatttnntctctattnttattagtntattacaatgtgcagtnagaggcgctagatgatagggcagacacgtcacacgcacccaccgcgtcgcgcgcgaggcgaggagcgagaggataacacacaagaggggcgagaatccagggagagagaggacgggatgaagaacatagcatgacagctcaccagccacgacagtctcatactcgcacatcacccatccgatcgtcaactagagtgtgtgtgcggctgccgtggctcagcctcggctgtccctctggcgtgcgcgtctgggttcccccatccccaccacacaccaccgagagtgcgcgcagtgctnacggcggggtggcctacaactctacaactctctanacactcaaacgtcgtctcnccatacagagtatatcacttctccata

SEQ ID NO: 13618 - DNA, 284 bp, Glycine max
  Coding DNA Sequence Number=SeqID_3839
ggaaagtgttctttggcctaacagtacaaatccacaagaataaaaaggcaaagatggtgatgctgggtttggaaaggctggaggtgactcaaaaatccaaaatagggttttgaaaccggaagaaccctaaggttaagatggagaagattaaaagcatggaattggaaaaaagaagaaggaaggccagaaggttttttaaagagaccctcaaaattgctgattcacctaagtccaaaaccttcaccttatgatgattccgctcgccaccctatgtttaattgtat

SEQ ID NO: 13619 - DNA, 567 bp, Glycine max
  misc_feature (92)..(92): n is a, c, g, or t
  misc_feature (97)..(97): n is a, c, g, or t
  misc_feature (187)..(187): n is a, c, g, or t
  misc_feature (308)..(308): n is a, c, g, or t
  misc_feature (326)..(326): n is a, c, g, or t
  misc_feature (331)..(331): n is a, c, g, or t
  misc_feature (371)..(371): n is a, c, g, or t
  misc_feature (386)..(386): n is a, c, g, or t
  misc_feature (396)..(396): n is a, c, g, or t
  misc_feature (399)..(399): n is a, c, g, or t
  misc_feature (507)..(507): n is a, c, g, or t
  Coding DNA Sequence Number=SeqID_3840
caactccgggttaatactcacgacggatggtgaggtctcgattagaatggcgcccgagtaaacatacgtttgtgacaacaaaagttattggnggtgngtgaggatgcgagagcagtatggtctcatggtgtagtattgacatttggatgttaagggtgtagtggtagtggtctgagccacattttgnttataactgttagtgtaagggtctatctatacacacctctaagaaataataagtctacgaggttaggtgaggaataacgcgacggcgtagtatgcgcatagtttatatatacgatgaatantcctccgccttttgtttnttgtnggaggtggatccgcgccggcgcggggtcgacgctatatgnttttgttggtcgcgngtgtgcattnttnggggaggtgaggtgggtgacccggtaggatgtcccgctaccaacaacaggattcatttttaatatctcttttattatcctccataattctaaattgttgtagggattngagtatgtatgtttatatgtgtatactcgcattgtatagtatcatatactctacccaccc

SEQ ID NO: 13620 - DNA, 487 bp, Glycine max
  Coding DNA Sequence Number=SeqID_3841
tacgcttacaattgcgctcgtgcgagctcgagagttaacttcctcacggaacgtgcctgggatatagataatgaagggcatgcagggtacatggatgcgacgaacatggttcttagtgctcattttcgtgcttatgtaccagcattggagactctacgattgcatatagcaccatatcatgactgacctgggcgttgagacttttagcattcggcctattcataagaccgcgggaaccactgaacaatcgatctgctgcattagctcttggggataggattaatatattgcaggatattgctgaacctgcattacttcctcatatagctcaagcccgctcccatagacatccatatgaggtcctattcacgagcttgcagaagctgctgatggatactgctacttcagaatgtgacccctgccatgatttctttggacaagaatctatatcttctgaactttgtccaggtccatttcgtgtcattga

SEQ ID NO: 13621 - DNA, 511 bp, Glycine max
  misc_feature (116)..(116): n is a, c, g, or t
  misc_feature (303)..(303): n is a, c, g, or t
  misc_feature (325)..(325): n is a, c, g, or t
  Coding DNA Sequence Number=SeqID_3842
ggaccgatcactacgtaaagggcacgcggatgtgcgtgatcgacaatgacactagggacaagggtagcgaggcaccaccctgcgcaatcagactagaggagagagcgacacggganagcgcgcagctgcgactcgcctcggggactgccgcgtatagaccatacgtacaagatgtatcgccgtacacctccctagatgattctatttattcttctagtccacgaactgcgccgttatgtaacgatgcgcggcgcattcgataggcagacataacactactacattgatataacaaagtaatgntggagcgacggcgcgggccacnctgccatatcgcatcgttcaccagagatactacacgataaagcaaacaatataatgaatagtagcaattgatgaatatgatatactccgattctgactcgtgggggtgagtgagtagaatctatcttatctctatccctacctctactcgatgtgcgagcggcctctcaccgacataatcatgatg

SEQ ID NO: 13622 - DNA, 483 bp, Glycine max
  misc_feature (33)..(33): n is a, c, g, or t
  misc_feature (124)..(126): n is a, c, g, or t
  misc_feature (144)..(144): n is a, c, g, or t
  misc_feature (188)..(188): n is a, c, g, or t
  misc_feature (281)..(281): n is a, c, g, or t
  misc_feature (308)..(308): n is a, c, g, or t
  misc_feature (344)..(344): n is a, c, g, or t
  misc_feature (378)..(378): n is a, c, g, or t
  misc_feature (389)..(389): n is a, c, g, or t
  misc_feature (431)..(431): n is a, c, g, or t
  misc_feature (447)..(447): n is a, c, g, or t
  Coding DNA Sequence Number=SeqID_3843
tcgtgcacccctaacgcagtagcggccttgcgncgcggaggtacgattcttatctgattaggtgagattatgttaggatattgtgagaatgtagtgggtaagctattatgaagcgatagcaagnnnaacacagacaaattctcnaacatcatcacgactcataacgatatagtattatctactctctncacacattacattcataatcactctctcacatagcatctacaccacatcgtagaatacgagttacgacattatgttgatatctttaattgaangatataaatatagtatacatataacantgacactaagctgggggaaccacacacgaccacaancaccacaaatctgtgtctgttttctatttaatancaaccatctgnttatgctgagaaggagatatccacgcagccgccgataaattngtggcaacctgcaccnggctcacggaggagctggagtagtcacacagcgcgc

SEQ ID NO: 13623 - DNA, 483 bp, Glycine max
  misc_feature (73)..(73): n is a, c, g, or t
  misc_feature (126)..(126): n is a, c, g, or t
  misc_feature (254)..(254): n is a, c, g, or t
  misc_feature (274)..(274): n is a, c, g, or t
  misc_feature (315)..(315): n is a, c, g, or t
  misc_feature (320)..(320): n is a, c, g, or t
  misc_feature (344)..(344): n is a, c, g, or t
  misc_feature (359)..(359): n is a, c, g, or t
  misc_feature (410)..(410): n is a, c, g, or t
  Coding DNA Sequence Number=SeqID_3844
cacagtgtggcttgtcctctggttagtctacattcggttagaattagtcttatacactctgtctcccccgccncgccctgccatggcatcacagagcgcggagcccgagacctatcgcttacacancatactccccgcggtacacagtgactatgccgatgctcgcctccactctctcctatgttctctgccgcctcgctcttcttacacggacaatcaccggccgcacatgtcgcctatggtatcttgtctangcattgtacgtatatacgtngcctgcgccgcgtcgtgcagagcctatcactgtatgttgcnctatncgctgtcgactgatctcgctacgntcactaggattcgtnacgtacggtgtggtgagctgtagcccagcgtcgttgattcgtcaactgtcncacggtacctcgtataatgatctgttatgcgcaggtcagctaacacgtgatagtcactcagctagacacagag

SEQ ID NO: 13624 - DNA, 508 bp, Glycine max
  Coding DNA Sequence Number=SeqID_3845
agatgcgtgaagctggcctgtccacgacagtgccgaacagtagtgaccgatagtgagaaacaggccctgctggcccatctcaagagcagtcacggcgacaaggtcgaagagccgcgcaagatcaccttgcagcgcaagaccaccagcaccctgcgcgttgctggtagcaagaccatcagtgttgaagtgcgcaagaagaaaaccttcgtcaagcgcagcccggaagagatcgaagccgagaagcagcgcgagctggaagcgcagcgcgccgctgccgaggctgaacgcctgaaggccgaagaagaagccaagcgcaaggctgacgaagaagccaagcgtcagcctgccgctgctgcgaccgatggcgctgcaccagttgctgcgccgacgcctgtcagcgagccgctggttgccgctccggtcgtcgaagtcgagcgcaagaaagaggaagtgcgtcgccccgagaaggcacgctctgatgaagatgagcgtcgcgatcgcaagcaca

SEQ ID NO: 13625 - DNA, 514 bp, Glycine max
  misc_feature (56)..(56): n is a, c, g, or t
  misc_feature (96)..(96): n is a, c, g, or t
  misc_feature (326)..(326): n is a, c, g, or t
  misc_feature (339)..(339): n is a, c, g, or t
  misc_feature (341)..(341): n is a, c, g, or t
  misc_feature (354)..(354): n is a, c, g, or t
  misc_feature (379)..(379): n is a, c, g, or t
  misc_feature (383)..(383): n is a, c, g, or t
  misc_feature (387)..(387): n is a, c, g, or t
  misc_feature (487)..(487): n is a, c, g, or t
  Coding DNA Sequence Number=SeqID_3846
taggagatacttgctcgttcttctgattgtgtatggatttgctatactctcattanaatttatttagaccatacaacaaagatcacgtaggcaagntagaggcggcagaagggtagagaagaagagaagacacagcccccacacacacccggcgcagatggcaacaagagaacggatgagacaacaacacatatatatatggcaggtatactcgtcttgcacaatatattattatctatcgaaattctaatattaatatgtataggacgtagataagtaacatcacatcgcgcctcactctcagatataatataataaactataanactataatgtctntntgttcgggattantggtaagctccactcatccatcatnacantcanccatacacccacccacaacgatctattttgtctattgctcttttcgatgattttttatcccagtctctccgcacgtcatcatcgccgttcatctgggagntttgtatcatctcattcacctatatag

SEQ ID NO: 13626 - DNA, 591 bp, Glycine max
  Coding DNA Sequence Number=SeqID_3847
gagaaaagagcttccctggcgaaaccccaagcagtatgaaaaagagcgcttactccaagacttcaatccacaaccccgtcaccacttttaccaacgttgtggaatccaaaaactaaaaaagtctaatcactcagaacattttttctccttcatagtcaaggagaaatatgggaaggaataacccatccaaaccacctctaatttaaaatgaaagttggtttcttcagagttgaaaaacttttaaaggcgaaaaacatataaaaataaaaaaagccttttagtcagtcttaagacagctttctatcttacttcaaccattgactagcgcatacaatataaatatccgcggttagtgttcccagtgagctagaatgtattgttttactcccgtctgagatttcagagtcttctgaaactctctttcaaaactttgtctacagcccataaatctatcaattatatattatttgctataaatttatctttttgtttaaactgctggatatcgatcttatatgtttaacgctttttatttgtttaagatgttaagaatattatattctagttggccctttttggtctgacgtttat

SEQ ID NO: 13627 - DNA, 192 bp, Glycine max
  Coding DNA Sequence Number=SeqID_3848
gttgctggagtatcagtggaactatgactgtgggacttatgtcactaatacttttgaaattcggggttttaatatcatatctgaactgggtattgcctttggaatgcgatatatcgaagctgtatatgaggatggtttcattgcatatatcaatggccgagacttttattttaagcatctttgttccactgt

SEQ ID NO: 13628 - DNA, 371 bp, Glycine max
  misc_feature (54)..(54): n is a, c, g, or t
  misc_feature (63)..(63): n is a, c, g, or t
  misc_feature (67)..(67): n is a, c, g, or t
  misc_feature (71)..(71): n is a, c, g, or t
  misc_feature (78)..(78): n is a, c, g, or t
  misc_feature (93)..(93): n is a, c, g, or t
  misc_feature (110)..(110): n is a, c, g, or t
  misc_feature (121)..(121): n is a, c, g, or t
  misc_feature (128)..(128): n is a, c, g, or t
  misc_feature (135)..(135): n is a, c, g, or t
  misc_feature (149)..(150): n is a, c, g, or t
  misc_feature (162)..(162): n is a, c, g, or t
  misc_feature (168)..(168): n is a, c, g, or t
  misc_feature (171)..(171): n is a, c, g, or t
  misc_feature (198)..(198): n is a, c, g, or t
  misc_feature (202)..(202): n is a, c, g, or t
  misc_feature (205)..(205): n is a, c, g, or t
  misc_feature (218)..(218): n is a, c, g, or t
  misc_feature (254)..(254): n is a, c, g, or t
  misc_feature (272)..(272): n is a, c, g, or t
  misc_feature (276)..(276): n is a, c, g, or t
  misc_feature (292)..(292): n is a, c, g, or t
  misc_feature (298)..(298): n is a, c, g, or t
  misc_feature (317)..(317): n is a, c, g, or t
  misc_feature (338)..(339): n is a, c, g, or t
  misc_feature (343)..(343): n is a, c, g, or t
  misc_feature (345)..(345): n is a, c, g, or t
  Coding DNA Sequence Number=SeqID_3849
gcaaatcctaaaaagctgattgagatatatagaaactaccttccatttcacaanatgaagaangtgnttgncacattnttagctgggctagtngaatttgatcttacagngaaagcttcanaggcacnactaccngttaaaacaaattnngcatcaaatgantacaantgntcacaagcgtataacctgttagtttcntgcntanattacatgattgntggagatgatggggccccttcacgtgattgttgccnaagtgttaatgcagaganagcntcagcacccccacaantctccnaatggctgcatgtaagtgntttttccacggagaagactcnncttncnttcttgctcgaaaacaaggcccattc

SEQ ID NO: 13629 - DNA, 583 bp, Glycine max
  misc_feature (521)..(522): n is a, c, g, or t
  Coding DNA Sequence Number=SeqID_3850
aagtcaacgcgctgattgccagcggcgccaatatccagatcctcgacgtccgccgctttgacgaatacgcaaccatgaacatcccgggttcgatcagcgtacccggcgcggaactggtgctgcgcgcgggccgtgccgcgccggaccccgacaccacgatcatcatcaactgcgcgggccgcacccgctcgatcatcggcacccagtcgctgatcaatgccggcgtcaccaacaaggtgcgggcgctgcgcaacggcacgatcggctggacgctggcaaagcaaacgttcgaaaatgggtcggaccggcgcggcgagatcggcgccatcgccggcggcgaagctggcgcgcgcgatgtggcctatcgcgccggcgtccgccacatcggtcttgccgaattgacggtgctgttggcggatgcgcggcgcacgctgtaccgcttcgacgtgcgctcggaggatgagtattccgccagtcatctcgcgggcttccggcattatgccggcggacagctggtgcanngaggtcgacatggccgcaccggtccgcggcgcgcgcatcgtgctcacggatgaccggagcg

SEQ ID NO: 13630 - DNA, 492 bp, Glycine max
  misc_feature (88)..(88): n is a, c, g, or t
  misc_feature (115)..(115): n is a, c, g, or t
  misc_feature (179)..(179): n is a, c, g, or t
  misc_feature (219)..(219): n is a, c, g, or t
  misc_feature (314)..(314): n is a, c, g, or t
  misc_feature (329)..(329): n is a, c, g, or t
  misc_feature (335)..(335): n is a, c, g, or t
  Coding DNA Sequence Number=SeqID_3851
ggagatgagtgcgtgtgacacacacgcgagcgacgtgtgtgaagaggtgagcatatagatcagagtcgcacaccacctatttttgagntgtggagagaggagtgtacgacagctnctggatagatacggatgttaacatgatgtgtgtattctaatggaggtggtagtatgagggcagnacggcatgtgtgtcacaagagagatacgcgtggagctagnggactgttagccagacgacccgatgcgtacatacgcgaggcacgcgacacgcacgaccgacgagttctagaggagtccagatagtagtagacganaggaggatagagcancactgnatcgtcagtagaggggagtgggggagcgacgtgactgcaccgcgttatcgtgtcgtgatgagtgtgttttatcggtgtgggtgtgtgtagtgagctgtgagatgttgcacgccagcggtgtgggttgtctgcgtcgatcactgatttgtcggtgcgt

SEQ ID NO: 13631 - DNA, 175 bp, Glycine max
  Coding DNA Sequence Number=SeqID_3852
ttgcaagagggagagtcccgagcaattacccaactccaaaatcaagttcccattggtcttcaaaaaagttagaccgcctaccagcaagcttaagaccacatacaaggccaaaaagcccaatttgtttatgtaatgtgggttatgaatgggtctccaaaacctatggtgttttcca

SEQ ID NO: 13632 - DNA, 549 bp, Glycine max
  misc_feature (89)..(89): n is a, c, g, or t
  misc_feature (120)..(120): n is a, c, g, or t
  misc_feature (147)..(147): n is a, c, g, or t
  misc_feature (224)..(224): n is a, c, g, or t
  misc_feature (280)..(280): n is a, c, g, or t
  misc_feature (313)..(313): n is a, c, g, or t
  misc_feature (386)..(386): n is a, c, g, or t
  misc_feature (462)..(462): n is a, c, g, or t
  Coding DNA Sequence Number=SeqID_3853
gtgtactcagtcactatctacgtatgacatacatatatgtatagtcgaagctcatcaccacactgttcacgtacgagcatataataacngttagaattagagctcatggattaaacaccngatcctggtagatctaatatatacaanacatactcatcatactatatatggcattatgtacattatctcttgcgtttgcgtacacgtcttggtctagatcatcnttatctgagacgtgtgatctgacatgtagacaccactgcgcagaaacgctctatcntacaggctcgagtgagtacatatgactaccgtngaacggtacgactcgcatcatcatacatcgcctatgtactacacatgtgacagaatataacacagaggatgantacatcacatatatccgcgcgtcacatcaccagacggagcgcgcccagagcagctccgcgagagtaatactactgnctacgacaagagcgctgatcgtcggtgcctgctgccgacagagatgcatgatactagtatcctatctgccgattaccacacactgtc

SEQ ID NO: 13633 - DNA, 523 bp, Glycine max
  Coding DNA Sequence Number=SeqID_3854
ataatgagacactctctgtccgtcgtaagctaccgggggggctcgcgtagagacagcgtcaaaaagatcaaggcgaagtgtatgcaggggtcttattgccacgggagggtcaaggtaagtatccacagtcgattttgtggcttgggcgacaaaactgctgatcggtgtgattaaattcaagctgaagcgcattatcatgcccatgagaggttacagaactgtgggagggtatgctgcaatcgaggagatgacaagtaagcgtgaagtaacgtccctcctaactgctgtggtatattaaagactgagtatctaggctgttgccctgctctctactctcctatgcagggcgatccttgttctaaatgtggatctaccacgaatacatcatacgtataatgctgagagagcgagaccatttaccggagaagagaacagtctttcctataatagttaacagtctattcgcacagggtcggaaaaaaagaaaaagagagggagacgttgatcgtatggccgtcgagcg

SEQ ID NO: 13634 - DNA, 491 bp, Glycine max
  Coding DNA Sequence Number=SeqID_3855
agatttcgattagccgggctgcccatcccatccgagtactgtccagtcagttgttggccgttgctgtgattggtaagcacttactttttgactccaatcttcaagtctcctaaatcagcgaccatgccagtgaaagcagtgtgtgtgctcatcggtgagaccgtcaagggaaccgtcaacttcgagcaaagtgcggatggcgcccccgtacaggtgtcaggagagctatccggactagctaagggacttcacggcttccatgtccatgagtttggagataacacaaacggctgcaccagtgctgggccccacttcaaccctctgggcaaggaacatggagcccccaccgatgctgttcgacatgcgggtgatcttggaaacgtagaggctggagctgatggtgtggcaaagataaacatctcagacaaaatgataagcttgtcagggcctaacagcatcattggcagaactgttgtggttcatgctgatcc

SEQ ID NO: 13635 - DNA, 580 bp, Glycine max
  Coding DNA Sequence Number=SeqID_3856
gcaggaatcggcacgatgacctttttttgaaccttcatctaaaaaatatggtgcccttgggcatgtgatttctgacatggatacaaaaaaaccaattgttgtcgacaatggtgaaattgtcagatcaaccgtgacatcgattgaaaaaggcacaggaggtaatcctggagaaaaattggcgagattctcttccgaaagaaaaacaataggagatatctcccgcaacagcccttttggtatctttggtacgttaaccgaaaagcttgaaaatcatatagcggataaaccacttccagtcgctttatcaaatgaagtaaaagaaggtccagcagaaattttaactgttgtggatcatgataaagtggagaagtttgatattaaaatcgtcagcacaacaccgcagaaattcccagcaactaaaggaatggtattaaaggtaacagatgagcgtcttttaagcaaaacgggcggaatcgtccaaggaatgagcggaagccccatcatccaaaatggcaaagtcattggagcagtcacacacgtattcgtcaatgatccgactagcgggtacggcgtacacatt

SEQ ID NO: 13636 - DNA, 567 bp, Glycine max
  misc_feature (269)..(269): n is a, c, g, or t
  misc_feature (289)..(289): n is a, c, g, or t
  misc_feature (463)..(463): n is a, c, g, or t
  misc_feature (518)..(518): n is a, c, g, or t
  Coding DNA Sequence Number=SeqID_3857
acaccactaatgtaaccgccatgagatagatcaattactacaacatttacaaaatgtaatgacgctgcaaaataaactgaacaccgcacacgagaactcaccgcagcacgacacgaaaacattcacagcattcagcgcctagtagagtgtccacgcaccgtgccgcgccacgctaggtcaagcacatgcgttcttctaccgtactgttcgccacaccctcgagtactcagtgcgattatacactcactcccacctctccgtacattcancacgcgctgtagagatcacncatagtctcatctgaatcgggatgtgtaaaccaacggatactctgcaccggatacagggtcacatacaaatcgtagtcacgcgaagtgagtacgagcatgtacgcggtactcactacaggcaacacttaacacactcccatattcaatcgaggcgtcgatcaccaaagaggcgnaccctcacatctctgaagaacgactatatgtagagggcccagcgcggcgggtgtngtctcgcgccgttctcgctctctccctcccgtcgcgtaataagtagtgt

SEQ ID NO: 13637 - DNA, 574 bp, Glycine max
  misc_feature (135)..(135): n is a, c, g, or t
  misc_feature (378)..(378): n is a, c, g, or t
  misc_feature (386)..(386): n is a, c, g, or t
  misc_feature (457)..(457): n is a, c, g, or t
  misc_feature (492)..(492): n is a, c, g, or t
  Coding DNA Sequence Number=SeqID_3858
tagtacgctatcgaagtgtctatagagtgatctactattaatatagaatattgtataagctacgtagtatgacttctctctggctaatatatatctgcgtcacttgtatatgtgcggacaccacgcatcgagtcngatcgtgcagtgcgtagtagagtgctctcgtcgtcttatctcattatgatatagtatatagtgagtagagcggattgagcagcaggcggaataaaagcaacagactatatatctacagacatatctacactacgtcttcacttcacacaacatagattacgcgtcgtcacgattcactatcgtggagccgaacgagtcacatcaggacaagcgcgtagttcatgcatgtggtgagatgtattnaacttgtnatctcgctatgtgagagtattgagttccagtagagacatgacagtgatataagcctctatgccgcgtacangggtctgattgcgtctatgctcgatagaacatatntgaaggctgcgagaggtggtgtgtgcgtggcgtgtgctgagatactgtgagtgtgtagagacgcgagctgagatcgatacta

SEQ ID NO: 13638 - DNA, 298 bp, Glycine max
  Coding DNA Sequence Number=SeqID_3859
ttaaatcttgttgctcataagatattatgacttcattcaactaataattcatgtcgtttaggttacgttttataaccaaagagttgcttataatttctacgtgttcactcacctcttagctccctaactttcttctgaaatttactattccatgtttaaccccaacaacgtcaacatgataggaaggaaaagaagaagaggaaaccagggcccacaatgctcgtcgcggcggttttcgcggtgttgctatcacgtggaaggagaagaccgacatggacctgtggaggtttataccttt

SEQ ID NO: 13639 - DNA, 362 bp, Glycine max
  Coding DNA Sequence Number=SeqID_3860
gtagatctattatgatggcgcttaaaattttacatgcctggattctgattgaacttgttcttgtaggtctttccactatggccagtttagttagagttgcacatgtcataacactatataccaataactcccagctagtgagaaatttttttgtcactccattaacacatactggttagtgttagtcatactatttatgtacatggaatttgttgtcaattttgttagaatgcaaccttttggtaattctggacttttcttttgtggtaatgtaatgatgttacatgtttgctgattgttgtatatggaaaagacgaatcctattgttttctttttgatgtacacacatgctgatggttgac

SEQ ID NO: 13640 - DNA, 382 bp, Glycine max
  Coding DNA Sequence Number=SeqID_3861
ttcctccgtttcaggtatttctcgcctttatttcccatctagatatttgttttttttccacttccattcggttccttcactaattatcatttgggtcgttttgaatttcgattttctgggtgaatttccattgtaccttgtttcccatggatttgtgtactttttttttgttgcgaagtgttgataggggttgatgttgctaatgggttttgaaacaaaaatgtttttgttgttgggattaatttaacttgaacatggctacgttttggaacagaaagctgttcatggggctttctaaaaaacacttttctttttttttttgtccattctggaccgaaaaggaagttgatgccccataccggataacccatggagcaacact

SEQ ID NO: 13641 - DNA, 60 bp, Glycine max
  Coding DNA Sequence Number=SeqID_3862
attaattaccacgaagcgacgacagaagctttcaatcgatcgcgcaacttcatgattcta

SEQ ID NO: 13642 - DNA, 493 bp, Glycine max
  misc_feature (77)..(77): n is a, c, g, or t
  Coding DNA Sequence Number=SeqID_3863
aagagcatgcggatgtcgtcggatcatatgatattgtgtggataacgtgcaatgattctgctaaaacttcatagcanttatataattatgccactcttaagaagagagaatgcctgctataatagggcaaaagccaagggctcgacaaagatcttcttgatatatcttgagagaacccgaatttgcaaaggttccaagggagtttcttcttccagccggtgattttcccaatgttgaacccttcagacaggttctgagtggctatagcattgtcaaatttgagaaactaaagcccaaaatgtttctaggccgtcgttgtacatgcttgggtttgaaataccagagcttttgaagatattcagaaatccttacgattcaattaataaaagaatgttgccccatgttattatgtgatgaatgttttttggctgagattttgatgtttagattgttttaaaatgttggatttcctcatgtttggttgtctatagtc

SEQ ID NO: 13643 - DNA, 561 bp, Glycine max
  misc_feature (130)..(130): n is a, c, g, or t
  misc_feature (290)..(290): n is a, c, g, or t
  misc_feature (315)..(315): n is a, c, g, or t
  misc_feature (322)..(322): n is a, c, g, or t
  misc_feature (324)..(324): n is a, c, g, or t
  misc_feature (412)..(412): n is a, c, g, or t
  misc_feature (490)..(490): n is a, c, g, or t
  misc_feature (497)..(497): n is a, c, g, or t
  Coding DNA Sequence Number=SeqID_3864
tgcgcgacacgaacagacatgaagagagtgtcggagagtctgtatacgctatgatgagtgatgatagttgtagtatatagatatagtgctgtggacgctaagtgcgtgctgtatcgcctgtgcctgtganttgtgcgctggtgcagtatatgtgtgttcttgtcgcaggagcacgcgctgcgactgtgccccgtgcgccggtgggcgtgctgtgcacgtgtgatgtgccgacacttaatctagtcgtctgcgacgcgttggcgtctctatagacatgatgtgtgcactangagatgcattggatatcgagtgtgncgtgtgngncgactgtctgcagagcctctaatagttcaaccacgacgcgtgtcttgaaacaacacacatctctcagacgagttcactaatagacgcngacagacacacgctgcaacacgcaccgcgagtcgcgtgaacgacagagagacacgtatgtgcgcaggccgtgcgcgancatcaancgtccgctcgcaagcacacctcatgtactagacataacagcatgagaacccatcgtgtgtgtat

SEQ ID NO: 13644 - DNA, 498 bp, Glycine max
  misc_feature (121)..(121): n is a, c, g, or t
  misc_feature (283)..(283): n is a, c, g, or t
  misc_feature (308)..(308): n is a, c, g, or t
  Coding DNA Sequence Number=SeqID_3865
gttacagatcaacaactcgtcctacgactcatgataggctctccacatgccgtgtatgctacttcgcacgtcgactaagtacaagcaacaaatgctatgtggttagagattaagttgatcngcgctaccgccgcccgaccagaggagtgcacacaactcacactcttctggcgtgcgattccgccactctctcgtatttatggcgccgcttgcggttctacctatgtatacgccgcgccggtcagaatcgatatcggacacaagacgctgaagaccagcccancgtcacaccacgtaagcgaccgcgngtcaagcgagctatcatctgctcagaatgcactgacatctatctatcacctatgcctgctcgtgcgcagcgctatagatcagctagcatcgtaaccttagagcatgtgcgcacccgcggccgaatcctatctcctctcgatgtaatatgagagcatatacttgtcactgttgtgtatgagctcgtgttga

SEQ ID NO: 13645 - DNA, 538 bp, Glycine max
  Coding DNA Sequence Number=SeqID_3866
cattctgtcgaatggtcgcttgggaaggactatagctccttggctactggaaaaccttatgccattggcgatacaatcgtgttcaactacggtgcgggtcacacggtggacgaagtgagtgaaagtgactacaaaagttgcacattggggaactcaatttcttcggacagtagcggaacaacaagcatagctctaaagacagctggttctcactacttcatttgcgctatccccggccactgtgccggcggcatgaagctctctgtctacgtaggtgcagaagcctcttcagacggtggcggtgacagtggtgacggtaccacccccaaaactacaccttctccaactgtagagggcaggaaggctgctccttccgcttctgccactgctatgttgaagccgttcaaagctttggttttgacttgtgtagctgcattattatatgctttggctctttcttagttgtttttaatttctcgttgatttggtttggctcgtttgaaaatccagctagaggcagtgctatgagccctattat

SEQ ID NO: 13646 - DNA, 168 bp, Glycine max
  Coding DNA Sequence Number=SeqID_3867
cgggtgcagtttcactagctgtatttgccctgttcgccatagtggcagcagataccaggatattgcccttccatggtgtgcatgctccacattggcctccatgggcaaacctctctatgcctgttccatcgtcaaagagcccttgccctaagggttccctacgtgaga

SEQ ID NO: 13647 - DNA, 568 bp, Glycine max
  misc_feature (508)..(508): n is a, c, g, or t
  misc_feature (510)..(510): n is a, c, g, or t
  Coding DNA Sequence Number=SeqID_3868
aaagggtacaccattcacctactcaccaccgactcgatatacgtgcacacccattgcggtgccctccgcgcttagtaaaaatactattcacatatctaacagacacactatatacgctcaatatagctgccttgtaccatccgctaactgtctactacgtgtatgccttctacatcgggtatgagatcacacctgcagagcacttctctctctattctgtggtgttataataacatacatcctgcgcgtgtataatatatgtatattattatatctactatatatatatgtgtgtattgttgtatatagtagtgacagtcgcacacgaccacaccattacttctctcctcatatcctatccacgtgagtcagacgcgactgtgctaggcattatgatgtgtgatatcacgttattagataataaccttatatagagagagaaacaagaggagagtatgtgtgggtgttattatccctatttagtgtttgtgtgattcctctgttctcncnaaatctactccgtcccggcaactacgacgctgcatttgcgcttacttatgtctctata

SEQ ID NO: 13648 - DNA, 432 bp, Glycine max
  Coding DNA Sequence Number=SeqID_3869
gatacacagacatggctgtaggcaaaaataagggtctttcgaagggaggaaagaagggagttaagaagaagattgtcgaccccttcaccaggaaggattggtacgatgtcaaggcaccgtccatgttcacaacccgccagattggcaagaccctcgtcaacaggacccaggtaccaagattgcttctgagggtctgaagcaccgtgtgtttgaggtctctctagctgatcttcagaatgacaatgatgctgagaggtccttccgcaagttccgcctgattgctgaggatgtccagggtcgtaatgtccttaccaacttccacggcatggacctgacaactgacaagctcagaagtatggtcaagaaatggcagattcttattgaagctaatgttgacgtcaagacaactgacggttacctccttcgagtatt

SEQ ID NO: 13649 - DNA, 559 bp, Glycine max
  misc_feature (468)..(468): n is a, c, g, or t
  Coding DNA Sequence Number=SeqID_3870
gcgccaacgtacctgtaatctcgagcccacttgtcgactcctctatggctattcctctccgaatatctatacaattaaacacgcgcgcttctcactaatatctcgttcatatgcgtcatcacacgtgagcacgcgcctcatattcatttgtgttcatctattacacgatagtatggttctgtctctggttaacataatatataaaatataaccacgctggcgtggttacatatcgcgcggacagacacaaagagtatactcctcctccctcacacgtcgtcgttcccaaacactcgtatattttatatattccattttgaatataactatattttgtcggcgtgcgcgtagtacaatggaacgaaatagacgttactgcgcagcgtatcgtgtgtcgaacataaatgaataaacaacaagctgcgctacaaagagagaaagagaacacgcgtgggtggcgggcgtccncctctttctgtttaggaaactatctactttcttttgctgtactctctcctctattcgtgtcggtttaatagttgtgtgattcttccctcgt

SEQ ID NO: 13650 - DNA, 399 bp, Glycine max
  Coding DNA Sequence Number=SeqID_3871
agaggagcaagcgaacatgaggatcgaagctgctaattctcagattcagatagcaagggagtctgaactaagaagcttggagaagttaaaagaactgaatgaggagttgtctgtaagaagagaatctctcagcattgcaaccgagaatttcaaaaaggccaatgaaggaaagttagctgtagaacatgaattaagaacttggagggctgaacaagagaaacaaaagaagcctggtgaattgaatgatgaacaaacttctactccaactaagcctgcacatgattcatcaagccctaagggaaaagttccttcaaataacattgaagttggatcagcctcagataagaacaaaaagaagaagaagaagaagtcattatttccttccaaagttgtaatgtt

SEQ ID NO: 13651 - DNA, 551 bp, Glycine max
  Coding DNA Sequence Number=SeqID_3872
gtatgaatctttttgatctaccaatttgactatttcattcgtaaaattaaatttataaaaaaatgcctaaagtaagaaggagtaaaaaatctccaccagaaggttgggaacttattgaacctacccttgaagaattggaacagaaaatgagagaagctgagacagagccacatgagggaaaaaggaaggttgagtctctttggccaatatttaaaattcatcatcagaaatcaagatatatttatgatctgttctatagaagaaaagccatcagtagagaactttatgagtattgtttgaatgaaaatattgctgacaaaaacctaattgccaaatggaagaaacmagggtatgaaaacctytgttgtytccgatgtattcaagcaagggatacgaattttgggactagctgcatttgtcgagtccctaaagcaaaacttkaagagggtcggatagttgagtgcattcmctgtggatgccgaggctgctctggttgatattctcmcaaaattattactaattgaatattgtgtatatgcataggacttatt

SEQ ID NO: 13652 - DNA, 594 bp, Glycine max
  misc_feature (32)..(32): n is a, c, g, or t
  misc_feature (82)..(82): n is a, c, g, or t
  misc_feature (213)..(213): n is a, c, g, or t
  misc_feature (232)..(232): n is a, c, g, or t
  misc_feature (332)..(332): n is a, c, g, or t
  misc_feature (462)..(462): n is a, c, g, or t
  misc_feature (472)..(472): n is a, c, g, or t
  misc_feature (478)..(478): n is a, c, g, or t
  Coding DNA Sequence Number=SeqID_3873
cgatagaatagctggctcgcctgtatacgggnagatgaattgtaatgtaaagtttcggctgtagaaacccacacaagagaanattgagctctaagcccgataagttatggtggagtgcacccacatgcccacccaactcctctctcgtgttgtgtcatttgctggataaagatgatagatgaagaccgtggcgtcgacatccagtcatattgncaacacctgaagtgtatgnctctagatggtctaatagtgtggtggctgtaacgggtgactgtatagacctgcactagcctgccccatactcgactgaataagatgctttacactgacgnccctctcctggctggggtgccccgcctgtcgttgtgcccgtatacgatggtgtaaacataaggagccgtgtatcacctgtacacatgactaatgtgttacaccgccgcctctatataaagtgggcaagangagaagaganatgtgnggatgtaagtgtatgagtgcatatacagagtcatctaacgtcgctcgctgaccactcggctggtgccggtgtgctatattcactcatactctccgccgcactctcgtgtatagata

SEQ ID NO: 13653 - DNA, 558 bp, Glycine max
  misc_feature (67)..(67): n is a, c, g, or t
  misc_feature (114)..(114): n is a, c, g, or t
  misc_feature (122)..(122): n is a, c, g, or t
  misc_feature (127)..(127): n is a, c, g, or t
  misc_feature (175)..(175): n is a, c, g, or t
  misc_feature (198)..(201): n is a, c, g, or t
  misc_feature (246)..(246): n is a, c, g, or t
  misc_feature (248)..(248): n is a, c, g, or t
  misc_feature (387)..(387): n is a, c, g, or t
  misc_feature (480)..(480): n is a, c, g, or t
  Coding DNA Sequence Number=SeqID_3874
agcaatctgcgctctgtgatctacacagctctaccacacgttcactcatgacatgggatcgtgatgntgagtgctcgtgagtatgtgtccgtgcacgcgtggctctcatgccgncgcgagcngtgantgtatggcgcgtgcgagaagcaggcgcatacgcatctcatacgacatnacgatatcgatcatactcaactnnnntctcaaccataccacgcatgtgcgtcatcgtcgaattcatcatgntnctactactagtacctacgtacagcatctgacactccctctcaacggatcgtctgctcgatacgcgactgctgtagtacgattcaaccaccactatctatgtatgtacgtagtgacataatactaatagttagtgtgtgngcatagctccgttactcgcgcgatatcatctgctccgtactatatcagacggaacactacacactcacactcatactatacgctaatgccatntgcgtcactacacgtcacgatcgacactaccctcgcgcgagacggcgcctcggagacacgaaacatcaatccgcgcga

SEQ ID NO: 13654 - DNA, 475 bp, Glycine max
  misc_feature (129)..(130): n is a, c, g, or t
  misc_feature (141)..(141): n is a, c, g, or t
  misc_feature (143)..(144): n is a, c, g, or t
  misc_feature (160)..(160): n is a, c, g, or t
  misc_feature (163)..(164): n is a, c, g, or t
  misc_feature (174)..(175): n is a, c, g, or t
  misc_feature (178)..(180): n is a, c, g, or t
  misc_feature (182)..(184): n is a, c, g, or t
  misc_feature (186)..(187): n is a, c, g, or t
  misc_feature (328)..(328): n is a, c, g, or t
  Coding DNA Sequence Number=SeqID_3875
gtgattgttacgaggacatgcttgtttttaaattggtacgaaagtgcgaaagttggatattgagcacaattgaaaagaattgcccataaaaaaaaaaaaagtggtttattttatcttaagcaataaaannaaggggtgagntnnatatgaaggaaataanaanngaggagaganngannnannnannggacactaagaaaaagagaaaagtatgtggtggtaaggtgagaaggaaagttgtaaccaccttgatgtggtgaaggaaacagcggaattgaataaaaaggataatgttgtttaaaaaagttaaattctatttataacccanatgggaaaaaagtaattcctaagagtagctaatatgtaggtgataattgctagaagtgatagaatataaattgtagaaatgattagtctgaggatagagtcttggaatactgaaagaagggtaccctgcatatcgtttgtttgttta

SEQ ID NO: 13655 - DNA, 430 bp, Glycine max
  Coding DNA Sequence Number=SeqID_3876
tacaggcgtgagaacaccatgcaaggggacgacgaaaaggctatgagcggaggccgctgctgctggtcgtggttggaaacttgatacagcactcatatgcccataagatcaccttgtacagagacgtgggactcctcttctagcccggagatctgacgaactctatactaagagtgtagtcgaaatcttgctgggtgctttcataacaaattcgtacactggttctaatgcacatgctactgctgtgaaactcgtacatggatctcttgtggaggcagatacgggaattataggcattggagcaaaacctgctgtgactacctttgagagggtggccctgaatacagaggttgttggcatacaggtcgaaggtcagtttcggacaagcactcccgggatctttgctgttggtgatgtagcctccttccct

SEQ ID NO: 13656 - DNA, 238 bp, Glycine max
  Coding DNA Sequence Number=SeqID_3877
atttcatgtgctggtgtagttgatgtgatatatgtaagcctgttagatgcccaacattctgttcatgatgtttgagattgatgccttcaattctgagcgaagtctcttttccgagtgcatgatcgattccactgtgagacgcaggacccatccagctcatgcgtactatgatgctttactttactggctctactacgaatcatgatttcaaaccccctctctattattactaaattag

SEQ ID NO: 13657 - DNA, 270 bp, Glycine max
  Coding DNA Sequence Number=SeqID_3878
tcgcagaggttgtggtcccgtcgtctcttcgcaaggggaggccggaggttggactcgttttgcgtacgactgtatggtcatgtccgttagtctagcgcgggtgatgacgagtagggtggccgatcgtcggcgacggtgagcaggccgctagcgctcagcgacatgcgcgactggtggacgaggaacatgtgggcgttcgtcaatgagtcacctcaacagcagctcgaagcaggcgcagtgggggcagcccctgaaaagcatcgtatgatg

SEQ ID NO: 13658 - DNA, 368 bp, Glycine max
  Coding DNA Sequence Number=SeqID_3879
tttccgacttcaaacaacttgacaatcttcgagaaattaggctttcttgatataagcatagctttctgtctacttgaacttcttgttcatatcatccaacttaaaactgagtttgttaattcaatttcattcgggaaatctttctttatttttataataataaagcttcgccgactttcattcttctcttctttcggctcgtacttctttacaatcaattctatcagaatcttctttcatttaaaccgcaccgcgtctttatcaatttcttatcttttcttcttctagaattctctttcttgggctaaacttcacatttatcctttcttgaatttttccaattcttcttgtactttccagaactttca

SEQ ID NO: 13659 - DNA, 449 bp, Glycine max
  misc_feature (170)..(170): n is a, c, g, or t
  misc_feature (230)..(230): n is a, c, g, or t
  Coding DNA Sequence Number=SeqID_3880
acaataagatgtgcgctatgcgtcgtatgacgatttgtctggagatttcacacgttaggggttctgattgtgaataagacaatgtgttggtttatcaaaactaatatgtatgtccagggcccgtttgtatacattacccacacgagcgtacaccttactattgttgtccnattatctagacattctaggcagagagttttgacgcgtacatatagaaaggtgagcgcatncttgtcaatcacgtaccctttgtgtctatgtatctactactttacgtgatgtatgttaatcctatattattctatcttactttaagatattccttgcggcgcgtacggcctgttgtgaagtctacataaaaatagtaaaaggagggggtgggctgcggggactctggctgccttcgagggtattagcgccggcctcgccctttcgtcagagagagttta

SEQ ID NO: 13660 - DNA, 335 bp, Glycine max
  Coding DNA Sequence Number=SeqID_3881
aacgcgtatcgtatgggtaccggtgggtggattgaggaaaaaaggaaaccccaccctcgccccctataactgcagtccgcaattcaccaggcggcctcaactgggcccggacattttttaacaaacgtacctggacccggggcaaacacaccccggcaggttaacccccacccttatatttgacctcttgaagcccacatatcccccctttttcgaccaggtttgggggtataataaataagtaacagagcccccgcatcccgaatatcgccccttctccaaaaaggtttgctgcaaaatcccgtacaagggccgaaatgggaaataattgccaa

SEQ ID NO: 13661 - DNA, 427 bp, Glycine max
  misc_feature (102)..(102): n is a, c, g, or t
  misc_feature (164)..(164): n is a, c, g, or t
  misc_feature (238)..(238): n is a, c, g, or t
  misc_feature (249)..(249): n is a, c, g, or t
  misc_feature (269)..(269): n is a, c, g, or t
  misc_feature (291)..(291): n is a, c, g, or t
  misc_feature (321)..(321): n is a, c, g, or t
  misc_feature (323)..(323): n is a, c, g, or t
  misc_feature (334)..(334): n is a, c, g, or t
  misc_feature (338)..(338): n is a, c, g, or t
  misc_feature (359)..(359): n is a, c, g, or t
  misc_feature (385)..(385): n is a, c, g, or t
  Coding DNA Sequence Number=SeqID_3882
cttttggatgttggtccatacaacttgcaaggagtgtggtgttgacatttatcttccatgcccctatgttgcccggcagggaaatttacaactccccctganacttttacactttgattttgggtttggggatttctccttctgcctaactttaagatttatantttatattgcttgttattgccttgtttgaaaaagaatgtttatgactacctgtttaatttccccattcttcccnatttaaaaatnagattttacattgtccttanaatattattgaaatttaaaaanattccttatgatttttttaaatatattttnanatatgaaaatnaatnaatctcccatttttgttattnaaaaaaaaaaaaaaaaaaactccaanggggggccggttcccattccccccatatgattctttttaaat

SEQ ID NO: 13662 - DNA, 567 bp, Glycine max
  Coding DNA Sequence Number=SeqID_3883
agttctgcggcatagatacctcgtctgtccacagaagcttatccctgcttatcctcgcatctcaccctatctgcagcactaggacgaactctcggtgaagttcctcgatccggagtacatccggagtattgcgggatagacatctcatctggcccgtaaggttgatgtcgtcctagcaggtacagggaggagattcctaggttgcgattcactaatggagaaggcctacttagatgtattgacagagagaagcaacatggagtttgaccactagcagcttgtgaacaagctgaagaacataatatatgacaataattcgcaatgaaattaggatgtcaacgaggttggattttcagactaagcaatgtgtggcatctaattcttcaattgttatccttcctgccgtgttgtcttatgttcgtcctgtctacgtaggatttagtttaatggttcagagtggctgtatcaatttcctagattgccttgtgtcacttgtatcattactacaaaatatcatgttttgatgcactggaatatgcatagtttaatacaacctcgctctcaaaa

SEQ ID NO: 13663 - DNA, 425 bp, Glycine max
  Coding DNA Sequence Number=SeqID_3884
agcgccaccgccgtagcagagggaagggatagaaacccgccgtcgccgcctctgcgggaattggaattggtggcgtctccggcctcgaattgggtctcaggtgactcaccggtgtgggtcgaagccatcgatgggagtaatcgctttggggattgctgtggagctaggaatcgctcgtcgaagccgagctccgccctggatccgcggctcgtcgtcgactggtcgcgtcgccgcctcaactcctaacgagcaacccactgtggaacctgagcttcaacaagtagaagtagctgagcaggagctcattgcagacgagcaacccactgtggaacctgagcttcaacaagtagaagtagctgagcaggagctcattgcaggagaagaacaggtggttcaggaggagccacaaggcgaggagtatgatc

SEQ ID NO: 13664 - DNA, 495 bp, Glycine max
  misc_feature (69)..(69): n is a, c, g, or t
  misc_feature (307)..(307): n is a, c, g, or t
  misc_feature (352)..(352): n is a, c, g, or t
  Coding DNA Sequence Number=SeqID_3885
cgcgactcattcctatgtatcatcatctcccatctctaccactcacatctcatgcactctacactatgnttacacattaaccctcttcgtattccatatataagatgacctcgtactatacttacagatcgcacctccttcctctactcatacaccgcacatcattgtcagtacagctctctcctctactacaattacgactacctctcacgcgtcgactcgcctcctatctctatatctatctaatatatactcttctctctagatcctcattatattccgctaccgagtcaaatattcacacatnaatcatctactcatactcaccgcctcactatcgatataatttatntactattaataaatcccttcaccattcttacatactctgttatcacgcaagcgtacgcgcatcacatatgctatctcagcttatgtaagaggtattgagtaccgcggttctaacactaacgcagaccattactgtttctactc

SEQ ID NO: 13665 - DNA, 514 bp, Glycine max
  misc_feature (67)..(67): n is a, c, g, or t
  misc_feature (187)..(187): n is a, c, g, or t
  misc_feature (238)..(238): n is a, c, g, or t
  misc_feature (288)..(288): n is a, c, g, or t
  misc_feature (329)..(329): n is a, c, g, or t
  Coding DNA Sequence Number=SeqID_3886
caacttcgtgctattgtcgatggtatctataatatcaccacactcactctgcccgtcactctctgcngtcgcatcatgaatgatctatacttactagtctgccgtcatcctctactcgtgtgcccatcatactagaatctctcgtgccgcgctatgatcatcgtatacactgtagtgcaccgcgtgngagacagcactcgtaagacgtactacgaccagatacatgactacgaaccgntactaccgcgcgacgaaagggagaagcgtgagcacacatacactctctgntcgtcaagcatgctatcacgaagctcgcggtggttcagtancttcgtcgcatagatacatacacgcgatgtgtgccgagcagagagcgtgagatgagtatagagacaaatccatatagtgagtatatagcacagtaccttgtctatacagaacaatccttcgactgaggattcctcgtgtgatcacctataatctactacactagctgcgctgtaagtcatatata

SEQ ID NO: 13666 - DNA, 405 bp, Glycine max
  misc_feature (375)..(375): n is a, c, g, or t
  Coding DNA Sequence Number=SeqID_3887
tgcttcctggcattcttccggtgaagtttaaacttcaccgtagtttttggtagtcttgtttgagggcgattatgataaacatttatggttttttactttaaatacatttgagttcatttaagtattttgcaatgatttttagagttcaatcgaattgatgtgttgttggtttctattaaaaacaaaaaaaaaaaaaaaaaaaaaaacatagggcaagaaacgaaataaccaaaaaagacaccaaaagtaatgacatatatacaaagctccgggcgccccccaactgatgggctgaggcacccgaaaattaattgggaaccggcacctgaaaccatactattttttcataatggagaatcattgaacatgccgtangagacattccagtgttagtcattgcaaatg

SEQ ID NO: 13667 - DNA, 529 bp, Glycine max
  misc_feature (121)..(121): n is a, c, g, or t
  misc_feature (133)..(133): n is a, c, g, or t
  misc_feature (172)..(172): n is a, c, g, or t
  misc_feature (222)..(222): n is a, c, g, or t
  misc_feature (232)..(232): n is a, c, g, or t
  misc_feature (237)..(237): n is a, c, g, or t
  misc_feature (289)..(289): n is a, c, g, or t
  misc_feature (295)..(295): n is a, c, g, or t
  misc_feature (332)..(332): n is a, c, g, or t
  misc_feature (338)..(338): n is a, c, g, or t
  misc_feature (341)..(341): n is a, c, g, or t
  misc_feature (365)..(365): n is a, c, g, or t
  misc_feature (367)..(367): n is a, c, g, or t
  misc_feature (381)..(381): n is a, c, g, or t
  misc_feature (387)..(387): n is a, c, g, or t
  misc_feature (392)..(392): n is a, c, g, or t
  misc_feature (425)..(425): n is a, c, g, or t
  misc_feature (429)..(429): n is a, c, g, or t
  misc_feature (437)..(437): n is a, c, g, or t
  misc_feature (481)..(481): n is a, c, g, or t
  Coding DNA Sequence Number=SeqID_3888
ctctacgcttgaaagagggtgcgacacatatctctctcaacgactcgctcgattatctcgacataatgtactacgtaaacgctcgtccgacgacacaactctactctccactaccacaacnatataagtttgntatgacgagtgacgagtggatagagacatagttgctatnacactcgcgccaatatcacacacgactgccgcatacacatgcctactttnacactatacncaatncatatatactattatctatagatcccagcacgcgacttacgaacatatctgnatagtngacatcaacaagagagttataaacagtatataaactncgcgcntcnataccagtgctgcatgacttgacntntacacatctctctnctcgcngtgangtcgtgtgtgtctatttcatgcgtgatagtcgnacanacgcaagngaagaacgacgacacgacgcgtcgtcgtgatgaagcgacagtcngctgctgcagatagatggacgactcagcacgcagtagcatgcagacta

SEQ ID NO: 13668 - DNA, 522 bp, Glycine max
  Coding DNA Sequence Number=SeqID_3889
ggcaggatctccgacgtttccgagcttccaggccaagaagctcttcttgtgggtgtcggtctccggcatcgtcgcgctctccgaagagggcaccctcgatttgcaggtcgacttcgtctccgaggagttctccgcctctctattcgaccgggtgcccgtcatgcggcgacagccacggcgcgcagctacgcggcgtcgccgggttcatccaggagctcgacctgctccctgttgcagaggcttgagcttggaggatccgtccgttcgttccacttccagcaaattctccttggatcatattgtgaggttatttgttacgcgagtaatgatgataataagatatccggagcctgttttagctgcatggagaaaggaatcgtgttccatggtggtgttctgttggcaaagtgtatgtggtatactgtctctccttagtgaactcggattctgtgtagaattatacatctgtttcgctgcaactgggacctgtgtaaaatgtatgtagctcattcatatttccct

SEQ ID NO: 13669 - DNA, 536 bp, Glycine max
  misc_feature (359)..(359): n is a, c, g, or t
  misc_feature (403)..(403): n is a, c, g, or t
  misc_feature (445)..(445): n is a, c, g, or t
  misc_feature (448)..(448): n is a, c, g, or t
  misc_feature (460)..(460): n is a, c, g, or t
  misc_feature (474)..(474): n is a, c, g, or t
  Coding DNA Sequence Number=SeqID_3890
ggaatctgggtattgcttcagcttatgtggctaagtcatggggtgtgcttgaaggtgttactctggctcgtcagagggggattgatttccttgagatcaacgtggattcgaaagttgttgctgatggactgaagggcgacaaacaagggtgtcttgagggctggacaatcgttggggccattaggaaagatggttagtggcttggagcaggtgaagattagtcatatctatagggaagcaaatcaatgtgcggatttgcatgtcaatcatgctcgtactcaacgaggaggatttgatgattttggagcatcctatagggctgttgaccccagttgttgcttatggattcttgtggagtngaaactcctcatgtagttggtggttagtcctggttttgtttttnggctttttacccccgttcaatacccaaaaaaaaaaaacctanacnccttttttattnaatacaccattacncatctgaattggaacttaacttattcctgatgccaatgaccaaagttcttctcattttccca

SEQ ID NO: 13670 - DNA, 588 bp, Glycine max
  misc_feature (339)..(339): n is a, c, g, or t
  misc_feature (343)..(343): n is a, c, g, or t
  Coding DNA Sequence Number=SeqID_3891
aatagtcatccgtggagttgcgccgtttctgtggttatcgtatctgattgtattgtcacaccgagtagcgtccagcggtccacacgacaatattgtatctttactgtctgatattctttcctcttagtacttctgcttcaatcattatgattatattatagtggacacgaacagatcgatggcgtgtcagcgtacacgatactaaccagtcatcgtctaggctcaacagagtacagaccggtatctcaccgcgcaccgtcgatgtcctaatccgtagttatataactcacgagtcgagccggtgaactcccgtaggaacaagtctgccctccggtgcgngccngtgcggccgcgtgtcgtcacgtgtccccggcctccgatcatatttattatatacaatctgcagacatacttagaatacatcaataaactccatattcactacaatattacaaccacctatcaccaccgcacacatgtagtgtagatttatgttataaatatatgagacaagctgatgtattagataatagagtatatatcttccctccagatgatacaccgccagatatgccgtagtcagtcgct

SEQ ID NO: 13671 - DNA, 492 bp, Glycine max
  Coding DNA Sequence Number=SeqID_3892
cccagttgatgctttactcacaatttacaaattaatttaatcaggtgatgtttaaatacaataccatttcactaaaatcaaaggaaagaagaacaggttctaacaattctacccaagctggaaatgcatccttccactgatcacaaaatctcagagcagatgtcatgtttacaacttgtgcagttctgaattaacaatcctgattttgataagatgctgacaactcttaaatcaattgaattctaatccttaagcacaagagggaaaggactgcctacttacaccagaaagaaatcaccaatttcaacagatatgcagacagttgatttgtttcaggttttcaagtccgccacaatactggtattattcaagcagtcccaaaacaaaatgcctgcgatgaaaggaaccaattttttgagttcatccataccattgttatgtccctgttatcacattgcagctagaatatctgttacatttcattcgtctaaa

SEQ ID NO: 13672 - DNA, 265 bp, Glycine max
  Coding DNA Sequence Number=SeqID_3893
tcgaaagagatgtacacctcccaagaggggtggggagctggaacaaagtcaacagcaaaacggacaactgatacagcaaggacgagtccaaggcacacagagttcaatggaaaaacctaccacctaccaggaacaaggaacctcttcgctttccctcacccttacaacacaaccagaagaccttcttctttccacagcggactcttccacaacccacgtacgacccacaacacactcccaccagcccctacttattattctatca

SEQ ID NO: 13673 - DNA, 363 bp, Glycine max
  misc_feature (26)..(26): n is a, c, g, or t
  misc_feature (47)..(47): n is a, c, g, or t
  misc_feature (51)..(51): n is a, c, g, or t
  misc_feature (53)..(54): n is a, c, g, or t
  misc_feature (61)..(61): n is a, c, g, or t
  misc_feature (69)..(69): n is a, c, g, or t
  misc_feature (80)..(80): n is a, c, g, or t
  misc_feature (87)..(87): n is a, c, g, or t
  misc_feature (110)..(111): n is a, c, g, or t
  misc_feature (115)..(115): n is a, c, g, or t
  misc_feature (118)..(118): n is a, c, g, or t
  misc_feature (120)..(120): n is a, c, g, or t
  misc_feature (138)..(139): n is a, c, g, or t
  misc_feature (263)..(263): n is a, c, g, or t
  misc_feature (272)..(274): n is a, c, g, or t
  misc_feature (295)..(295): n is a, c, g, or t
  misc_feature (334)..(334): n is a, c, g, or t
  misc_feature (338)..(338): n is a, c, g, or t
  Coding DNA Sequence Number=SeqID_3894
aggtgtgattgtactctacattctancgtcacacacatatcaacatnttcncnnaccaccncatattcnttccgatatantatctanctagatgtgtacttcatgctcgnngcgntcncnatccctgaaatcctaacnnccaccctcatattatctcacgcatctcctctatacatacactacgacatacgcatcatagtatacatctcgccgtgtgtatcatagagtaccagctgtgtcgttgggtatgtgtgggagtcggnacacagtannncgttaatgtgaatctgtgtcntctatccgtactctcttctctgcttctgacacgcatacnaccncaaacaatactacgtgtgtcacgtg

SEQ ID NO: 13674 - DNA, 454 bp, Glycine max
  misc_feature (42)..(42): n is a, c, g, or t
  misc_feature (57)..(57): n is a, c, g, or t
  misc_feature (59)..(59): n is a, c, g, or t
  misc_feature (114)..(114): n is a, c, g, or t
  misc_feature (124)..(124): n is a, c, g, or t
  misc_feature (130)..(130): n is a, c, g, or t
  misc_feature (133)..(133): n is a, c, g, or t
  misc_feature (138)..(138): n is a, c, g, or t
  misc_feature (155)..(155): n is a, c, g, or t
  misc_feature (158)..(158): n is a, c, g, or t
  misc_feature (166)..(166): n is a, c, g, or t
  misc_feature (168)..(168): n is a, c, g, or t
  misc_feature (175)..(175): n is a, c, g, or t
  misc_feature (193)..(193): n is a, c, g, or t
  misc_feature (196)..(196): n is a, c, g, or t
  misc_feature (199)..(199): n is a, c, g, or t
  misc_feature (201)..(201): n is a, c, g, or t
  misc_feature (204)..(204): n is a, c, g, or t
  misc_feature (224)..(224): n is a, c, g, or t
  misc_feature (248)..(248): n is a, c, g, or t
  misc_feature (250)..(250): n is a, c, g, or t
  misc_feature (276)..(276): n is a, c, g, or t
  misc_feature (280)..(280): n is a, c, g, or t
  misc_feature (288)..(288): n is a, c, g, or t
  misc_feature (297)..(297): n is a, c, g, or t
  misc_feature (323)..(324): n is a, c, g, or t
  misc_feature (332)..(333): n is a, c, g, or t
  misc_feature (344)..(344): n is a, c, g, or t
  misc_feature (350)..(350): n is a, c, g, or t
  misc_feature (356)..(356): n is a, c, g, or t
  misc_feature (362)..(362): n is a, c, g, or t
  misc_feature (376)..(376): n is a, c, g, or t
  misc_feature (385)..(385): n is a, c, g, or t
  misc_feature (398)..(398): n is a, c, g, or t
  misc_feature (400)..(400): n is a, c, g, or t
  misc_feature (403)..(403): n is a, c, g, or t
  misc_feature (428)..(428): n is a, c, g, or t
  Coding DNA Sequence Number=SeqID_3895
tctacgtggctgtgcgacttatacatattactgcagctctantgatgctgatgttgntnatcgatgactaattcgtagcactggtcgcgatgtagtgtataatactactgatcntcgacgatgnatgctnagncgctntacctcatgtctcgctnagntatcctgnantacgatnatcgcgatcgcagctacnaanganantantcgagatgcagcaacgttgntagtgcgtcatcgaactgacgcancngcgatgacacgactagtgacgtcatncgcngagtcaantctacacanctaaatagtcatcgatcgttcctacnncacgactnnatcgacgtcgntgatcntgctantactantcatcatgcagganaagtacaantcgcgacacggtnantcnacggaatgacgacgaacatagtagnagtcgattattgtatcggatgaacgt

SEQ ID NO: 13675 - DNA, 374 bp, Glycine max
  misc_feature (321)..(321): n is a, c, g, or t
  Coding DNA Sequence Number=SeqID_3896
aaacacagaattatttacatcattttttacaaaatttttacagcttttaaagcatctttttttatttaaaaaaaaatctaggacgatgattttttacaaaatgaaaggttatgtcttgcttttgacaattaatgtattctaatatttactacttacaaaattatattctattaatttattatcctaaatattttctacaatttcatttatatctttatttacatcttgatccaattgatcttcatcggcagtcattgaatagtttactagcggccttggttgatcaattagttgatttgttgatggattcaatgacattgngttttgactttgatatgtattctgatctaaatgtgatgattgctgttgctgtt

SEQ ID NO: 13676 - DNA, 307 bp, Glycine max
  misc_feature (148)..(148): n is a, c, g, or t
  misc_feature (228)..(228): n is a, c, g, or t
  misc_feature (268)..(268): n is a, c, g, or t
  Coding DNA Sequence Number=SeqID_3897
agaaggtgggttgattgtgtagattataagagaaggtagagttgtagatagggagaagtaagaggagagaaagaggtgggaatgtttcatgagtgaggagtactttgattatgttagcgtgattatgtctggggcttttgctcgccanttggatgacggacggttatggcccgagattggagaggaaagagaagagagaaggcctttgagaggagagtatacaccttncagcccaaggggtacgagcggagcgataaggaattcatgntgggaggaaacgggaagagacgccccaattacgccaggc

SEQ ID NO: 13677 - DNA, 576 bp, Glycine max
  misc_feature (313)..(313): n is a, c, g, or t
  Coding DNA Sequence Number=SeqID_3898
acaacccctacaagcgccgagggagcactaccacacgcgacgcaccgcacacaaggcgacaccacgcaccgaaagagaggggcacgacagccggagaaaaaacagaagaggagagggaaggagaggagaagcgaggaaaagaggttgggcgggcggccgagggcgcggcgggggcgggcagggagagacgcaacagccacggggcggtgccgcccggcaggcgcgccgccgccgggcgcccctcccggccacacgcgccgccgcccccacctcccccccccccccacgcacccaatacggcgcgcacaaccgnaacgaggcgtcaccgcagggggaggaggacaaggtgggatcaggaccttcagaccagcggggggtcgccaaaggggcacaagaagcgaggggcgggggcggagccggccacgcggccgcgccggctgcccgcacgggccgcgcggcggaaaaaaaaaaaaaaaacaaaacaaaaaaaacaaccaacaaagcaaaaaagaacaaagaaagaagagcgaagcgcgccacgccaacccccgaagaacccacccaaatctatacata

SEQ ID NO: 13678 - DNA, 488 bp, Glycine max
  misc_feature (198)..(198): n is a, c, g, or t
  misc_feature (260)..(260): n is a, c, g, or t
  misc_feature (334)..(334): n is a, c, g, or t
  misc_feature (405)..(405): n is a, c, g, or t
  misc_feature (446)..(446): n is a, c, g, or t
  Coding DNA Sequence Number=SeqID_3899
gacactatctacactctcttagtatacttactatgtcaccttcaattgtgaagcaccgccgccgctcctaccacacgatactactctcatcccactcacttattcctctctccatcgcatctattcataatatactatcccgccactctatattgagagtatactatcaaacacactgtgtcacgtcatacaccatangatgctctaatctaatgacacactcgacacatcctcctccacacagatgaccacgcctatgncgcatacaccggcacacacacagccacacaggcaagtgcacaaagacacggtcagtagtgtgactcaatgatanctcccgtctcatatacctagtgacactcccgctctctctccaccactccccgtcgcctcacactccgcgtncatatatgatatcaacacaattagagagagtacatgtctancatgataataacattactatctctgcctgtccagtatcatat

SEQ ID NO: 13679 - DNA, 427 bp, Glycine max
  misc_feature (102)..(102): n is a, c, g, or t
  misc_feature (139)..(139): n is a, c, g, or t
  misc_feature (144)..(144): n is a, c, g, or t
  misc_feature (184)..(184): n is a, c, g, or t
  misc_feature (384)..(385): n is a, c, g, or t
  Coding DNA Sequence Number=SeqID_3900
accaggcgaagaaacgggcagctcacacgtagagtatacgtggggcggaacgagcgtatcgcgcgagggatgaggtgcgcgtgtcagtgcgtgctggccagntgtggacgggggtcgtgagcggggaagtgagtgtcgnagctngtcctccacataccctctcggccctcctcctcccgtcttnctctatcgtcgctgcctcgttggcccgcacgctgtctatgtggcggtgtgcgtagtacgcgaacgcatcattacaatatatgagtggggtatcgcgtataccccaatcaccacttcgctcgttctcgcgcctctctccacccttcctctcctttcccccatattccttgggcgcataagcgacagaggaaggagagatanntggtcctcagccgcggagggacagccagaaaattacgcgaga

SEQ ID NO: 13680 - DNA, 145 bp, Glycine max
  Coding DNA Sequence Number=SeqID_3901
tattacaacaacatatctgaccagttattctggagcaggcagtaatctgataacagtgatctctggtggtaacttacaggaactagcgcaaatacttcgtctgaatcaaaccaagctcaaaatgacagaaggattagagcagagt

SEQ ID NO: 13681 - DNA, 547 bp, Glycine max
  misc_feature (109)..(109): n is a, c, g, or t
  misc_feature (195)..(195): n is a, c, g, or t
  misc_feature (334)..(334): n is a, c, g, or t
  misc_feature (456)..(456): n is a, c, g, or t
  Coding DNA Sequence Number=SeqID_3902
gcgcaggcgcgaagagaaaagtacaaagtgattggacagtgggcgataagagcgacgtcaaagaacagaagaagtacaacgaagaatgaatacgaagatgcacgtatantagtatacaggatataaagtgcaacaagaaagtatatctccatacatatatattgcatttatatattattctttaataatgtttgntatgtgtagatagttaatgctattctataattactgatcttgcatcagtccatagcctctctgttgtattttgtattgactcatgtgctgtagatcatcataatacatatatattatagcgcatatatgtctatatatngaatagtaccttaagttaattaggggagaagggtaagtagtgagtaactgtggtggtcttctatcaattaattatatttgtatatattatgtatagtgtggtgtggggatcgtatactactntttccttgcgtattggtgataggtgtgagagagcagcagacttgcgaagcgaatagtgggatgcgatagtcgtggtctttcgacgaggtgt

SEQ ID NO: 13682 - DNA, 515 bp, Glycine max
  misc_feature (160)..(160): n is a, c, g, or t
  Coding DNA Sequence Number=SeqID_3903
tgtgtgtgcttcttattacgccgcgggtttagggggaagttgtagggcgtggggtctgaataaattccggttgtgtgtgtattatggaaagagtattatgtctagatgaggtgtagtctatttgttctctgcgactctggttgaaggtgaatggtgccgngtggagggttgtctcacgggtgttgggagataggttttcggtttttaggttggagaaggatggattggcgctccgatcgtgtgttgggtttgcggcgtcaccagatttaatgttaaggtgaatggaggcaaataacagagagggaagtgatggccgcgcggtggattcggatagtaacaaggtaatacagttgagtttgttattcctaataagttatagctagtattatataatggtaggtgccccaagatggtgcaaccgaccccataatgaaaaagtagtctgctgtgtggatattttgtggtgtgggtgggtgtgggcggggtgggggggccctccctggtaatatgattgg

SEQ ID NO: 13683 - DNA, 171 bp, Glycine max
  misc_feature (90)..(92): n is a, c, g, or t
  misc_feature (121)..(123): n is a, c, g, or t
  Coding DNA Sequence Number=SeqID_3904
agctactggctaggcctctcttggaggagagcaggctgcgagggtattgcacgagctcctcatccgaaaagatggtagcttcggtgcttnnngagagactgcgcgttgtgataccaaaacnnnatcctactgtttacgcctttcaggagttcaagttcaattggcaacagc

SEQ ID NO: 13684 - DNA, 411 bp, Glycine max
  misc_feature (38)..(38): n is a, c, g, or t
  misc_feature (49)..(49): n is a, c, g, or t
  misc_feature (53)..(53): n is a, c, g, or t
  misc_feature (58)..(58): n is a, c, g, or t
  misc_feature (66)..(66): n is a, c, g, or t
  misc_feature (70)..(70): n is a, c, g, or t
  misc_feature (72)..(72): n is a, c, g, or t
  misc_feature (78)..(78): n is a, c, g, or t
  misc_feature (90)..(90): n is a, c, g, or t
  misc_feature (134)..(134): n is a, c, g, or t
  misc_feature (136)..(136): n is a, c, g, or t
  misc_feature (287)..(287): n is a, c, g, or t
  misc_feature (323)..(323): n is a, c, g, or t
  misc_feature (376)..(376): n is a, c, g, or t
  Coding DNA Sequence Number=SeqID_3905
tcatacagagtatcggcagagcgcgctgacagagaccncgtaccgtgtnggancgacngtactagncccnanaccatncacaactgacangacgtcactttagtctcatcccgttcactctactgttatacatnanactctatcatcacctagatgatactctccgtcacgtactcacacttcctgctgcatctcctactactagtctctatcatctataatacatctcgttctatctcgatctagtactacataaatgacgtatcatcaatgacacgaccgacacngtctgctacaatgatcatactgctccgcgtgtctancctactacgcgtcatcctacacctcgtcttcaattctctgcatgccacattcntcatcagcactcagctccacaggatccatgagatc

SEQ ID NO: 13685 - DNA, 490 bp, Glycine max
  misc_feature (73)..(73): n is a, c, g, or t
  misc_feature (96)..(96): n is a, c, g, or t
  misc_feature (176)..(176): n is a, c, g, or t
  misc_feature (201)..(201): n is a, c, g, or t
  misc_feature (303)..(303): n is a, c, g, or t
  misc_feature (314)..(314): n is a, c, g, or t
  misc_feature (378)..(378): n is a, c, g, or t
  misc_feature (388)..(388): n is a, c, g, or t
  misc_feature (440)..(440): n is a, c, g, or t
  misc_feature (460)..(460): n is a, c, g, or t
  Coding DNA Sequence Number=SeqID_3906
gaggcacacacaagagcgaaagggagagacgcagacacgacgcacacgggggtgcggaagagcgcggcggccngggacgacgcagaggcgagcacngcgaagtgtacattagccgataatccagcacacatggaagtaggtctctgctagtctccacaccagacttaatatcgtantcattcaatgtatatacagtacggngctatcccaatctcctcgtcaccactactctatacataatcctcataataacaacacacaagcagcgcgcggtgcgcgcgcagggtgcggaggggagcaggntgggcgtgtcngcgggcgcccccacgaacgacaaagagcaacagcagaagagtaagacgctcaccagagacagcnagcatatggntgatagtaatttgcgagtgttatgtaatcaattatacaggcggcgacgatgntgaggagagggtgagatggntagatagaagcacagcgcaccacgaatcac

SEQ ID NO: 13686 - DNA, 485 bp, Glycine max
  misc_feature (38)..(38): n is a, c, g, or t
  misc_feature (108)..(108): n is a, c, g, or t
  misc_feature (161)..(161): n is a, c, g, or t
  Coding DNA Sequence Number=SeqID_3907
attaacatatcatcctctacacatcgccggaaacacanacaaagcacgacgccaatctatacagccaccaccacatccaacaaccatcattcaataacatctctattnttatacttctcaatatattataattaatgtacaatcaactattcttctatganttgttgttgtaactgtattatattgtaggatcttgttgctcactataactatatttttcttttcttctataatctctctcttctctttcctattttctctgtgtatagatgtagcctctcctctagccactctcacctcaatctgactaagtcatcttgctgttcatgatatatgacaagcgtgggctgcgccccacgcccccaactcagcgtcttcttctcttttttaccacactcaccacactacctcattattataacataatatcatactaatctcctacattctaactcacttctggccttaccttcgtattcgacata

SEQ ID NO: 13687 - DNA, 548 bp, Glycine max
  misc_feature (223)..(223): n is a, c, g, or t
  misc_feature (305)..(305): n is a, c, g, or t
  misc_feature (353)..(353): n is a, c, g, or t
  misc_feature (357)..(357): n is a, c, g, or t
  misc_feature (473)..(473): n is a, c, g, or t
  misc_feature (481)..(484): n is a, c, g, or t
  Coding DNA Sequence Number=SeqID_3908
gtacgccgcatatacgcacgtgagacgatatggacgatgcatgtcgacgtcgcgccgcagtagattgtgactgcggggctgtgcagtactgagtctgcggctcagtagtgcgtgtcgcttatactgatgctcttcatacgcagcagcccgagctccctgacgcagttaattgtacttgcgtggcttgtcgagcggcgcgaggtgttagtcagtacagagacgngtgtgtgtatggggaggtctctcgatcgagttctgccacatgatagtgtgtgatgtcgcgctacatcataacagtgatcatngaggtcactctcgtctctttgcgtgtagcagcaagaacagcggcgcgnccgngacgtgggtggagtccaattgtcggtgatggttgttgttcacggtcattacaatacaatcacccacaccgagttgtccgggccaagtgggttcgcgtcgtcagcgtctggcgggangagagtgnnnnggtctatgttgcagctgcatgttagagtagtgcgtgcagtatgctgtgcggtcgtctgttcgaa

SEQ ID NO: 13688 - DNA, 498 bp, Glycine max
  misc_feature (333)..(333): n is a, c, g, or t
  misc_feature (452)..(452): n is a, c, g, or t
  misc_feature (454)..(454): n is a, c, g, or t
  misc_feature (461)..(461): n is a, c, g, or t
  misc_feature (464)..(464): n is a, c, g, or t
  Coding DNA Sequence Number=SeqID_3909
atcctccttcatcaacggcagacaatatcctcaccccctctctcttttttattctcatcattaatatataaatctgatccttccgccaatcttcatcttttcctccaataccgcctccacccctttatttctctctgtctctctctctctctctcacgattatttcgctttgaagagtgctgaacgaccaacatggcaaacgaataccatcgcaagagagagttcatgggagattacgccaccatgaagaagctactgctactcgtgatgcatggaagcgattctgacgaatatcaccagatgcttatacctttctcctggagtgacaaagantcgtgctatggatcaagggggttagcgcagtcgtctctaggtgtgaaagacggctgtgttcaacagatgcaggcccacacgcgcgtactattggagggctgggaccgacagttacaaangntctgggncgncaacaccactaccacgccggcatatctaaggcta

SEQ ID NO: 13689 - DNA, 543 bp, Glycine max
  Coding DNA Sequence Number=SeqID_3910
tggagaacctccactgtatgcggacagcccgaaatatcaagaccacgaacatgccgccagctcaagtcccatccggcatggccctgagtggtggagagcctcagttggcatcaaccaagccacaggcagagaaggcgatgctgctcgacctctggctgaagccgtgcgctcccttttggcagacattctcggaatcacagcccgcagagtcgacgtgtacmccacaaytcccaccgaactcrccgtggccgtytacgacagsgacgawccgtccgccaaaacctctgtccaggcgctcaaggaattctgtgacctgcasagattgcgcagcttcggctcaagactaaccgacagtcagttcggcgcctgggaagacctcgtggagctcatcgacatgccctcttggcaatttctaggcatggccgatgaggtggcccagatgcacaccacgtccatgcataaagccggtcagtacaaagacggcgcggtacacgctcagcaagcagtggaaaagtatcacccgcaccacacaagagtttacaa

SEQ ID NO: 13690 - DNA, 424 bp, Glycine max
  Coding DNA Sequence Number=SeqID_3911
gccatgacgtctgacttctcaattaggaatcgagaaatataataagatatctatctatggcagtttgaagctttgccaatttttgcttaatctttcgacgatgtggctttgcattagtctcttattttatacgcactatatcatcgtcagaagatgcccctcgtcaattgcggactgtgatattcatatccccggtccagagctggtggcagacgcgcaatacatcaatcaaagctggatgcaggctcgcagttcatgatatgaactctgatgttctcgagatgttctctcagatgggagttcccacaaagaaaacaccttatgaagtttcagaagcaagtgatgttgtaatcacaatgctacctaattctgcccatgtgagtatggccattagttccaaaaggcattcccctacatgtgaaag

SEQ ID NO: 13691 - DNA, 492 bp, Glycine max
  misc_feature (123)..(123): n is a, c, g, or t
  misc_feature (364)..(364): n is a, c, g, or t
  misc_feature (382)..(382): n is a, c, g, or t
  misc_feature (466)..(466): n is a, c, g, or t
  Coding DNA Sequence Number=SeqID_3912
gtagaacgattaccatcacacactaaccacagtatgaggcggaaacaccacaatataccatacgtcctgtgtcgcggtggagtgacgcggatagggaagacgctgcgaccatcctaagagtgncgctgcggtgagcacacgagagtctgtgcggtaagaagagtgtgtgtgtgctcgtccctgctctgggcgctgtcctagcgactggttgtcgatgtgccctcgactagtacgctcctatgtgaatatcagagaaaggcatgctaacaatggagaactgacacctatactgcctgcaggtatgacacacactgagggcgcagagccgaaatggtgataagagtgtaaactaagcagagagagngactaaatacaaataggnacacgaagtggcgagtgataatcatgtcacgcttgtagtcagtcgcacggcgtcaggcgtccagagcgtggatggtgtgcacancacatcatgtaatgtatcgctcagat

SEQ ID NO: 13692 - DNA, 531 bp, Glycine max
  misc_feature (218)..(218): n is a, c, g, or t
  misc_feature (290)..(290): n is a, c, g, or t
  misc_feature (346)..(346): n is a, c, g, or t
  misc_feature (397)..(397): n is a, c, g, or t
  misc_feature (458)..(458): n is a, c, g, or t
  Coding DNA Sequence Number=SeqID_3913
aaacaccacataatgcccaatactcgcccttacaatagtcgcattcactctactacctacgcgaatgctcactgagacactcacatgcgcaagccaatgcgcacatatgaactcgttttataccatccacctctctaagtactcacacgcgccaaacactatcgcaagccgcatatcctctaccgctatcacccttgtcactcacacatctaccacancacacggcacaccaacatgcgtcgcgcacgacattcaatacgacgaatctaccatacgcacacaacacggcnacgcactaggctattcgcgtatctctacacacgcgcgaacgaccctactactaccnacacaagtagacacatgatctgatgacatactaacgcgatgcagctctatnactgccacacctcgctcactatactatatatgcaacacgaagcctctacgcacactacatncatcccgcttgctcgatgcgcgtgatgcctcgtctacgagaatcatacagcgtggcgtatatcaacatccggt

SEQ ID NO: 13693 - DNA, 537 bp, Glycine max
  misc_feature (42)..(42): n is a, c, g, or t
  misc_feature (69)..(69): n is a, c, g, or t
  misc_feature (119)..(119): n is a, c, g, or t
  misc_feature (187)..(187): n is a, c, g, or t
  misc_feature (337)..(337): n is a, c, g, or t
  Coding DNA Sequence Number=SeqID_3914
ctcgagagtgtgtagcgcgtcacgtgcgtgtatcgtagtggnatctgttatcatcatatcgttattganagttcagagcgtcgacgcacaatatacacgcctctgcggtgcgcgacgcngcgctggatgacgcggtgcctgccggtacgctcgtcgcgtgataggcacgtgacgactgatgtagctngcatatgtaagtacgtacacacgacatcgtcgagcgcggcgtgtacgtactgagcgcgagacacacatcattacgacgcgacgcagatatatgctctgcgccgcccgcgctcgcgtgtgctatgcgtactctcaccacactctgctcacntcactcacgtgccgcgtgagtcatcatcgtgtagcgcgcaatctgccgcgcgacgtccgctcgcgcaccgccgtgatgctacagatgtgtgtgcgatgagtcgtcgactctcgacatcgtctgcgtcgtgacctctgctgcgacagcgcagcgcacgcagatggcgatgagcagtgtatgtactcatcgacatcgtgcat

SEQ ID NO: 13694 - DNA, 582 bp, Glycine max
  misc_feature (166)..(166): n is a, c, g, or t
  misc_feature (368)..(368): n is a, c, g, or t
  misc_feature (392)..(392): n is a, c, g, or t
  misc_feature (405)..(405): n is a, c, g, or t
  misc_feature (436)..(436): n is a, c, g, or t
  misc_feature (477)..(477): n is a, c, g, or t
  misc_feature (479)..(479): n is a, c, g, or t
  misc_feature (514)..(514): n is a, c, g, or t
  misc_feature (552)..(552): n is a, c, g, or t
  misc_feature (557)..(557): n is a, c, g, or t
  Coding DNA Sequence Number=SeqID_3915
agaagaggcacacgactctgtcactcgttgctatctcctgctctatgttatctacatatctgactccacttccacgacgtctgctctcctccgacacccacagcacatcgctcgtatacgtttccactcgtgttctgcgcactatagcgcattgtagtagcctggngcacctgccgcagcacactgcctccgaccaactcgtacgtgactatatacctctcatgctcataccacgtcgtctgcagcctacagtgcacgctaaaactgtccactcacctcctacacacctccatacacagtgcctcaatcgctacacacatctatatcatatatctagaggacatatacttagagtcaatagctagaanacgcatgagatccattacaacctnatatcttgaactnctctcacggtctacacaacgcacagcactanattgtcactcgatgagtcctcgcacgctattgctggtgtcntngctgtatgactttatatttgttcgatgtgctccgntttggttgcttgttgctgtgtattcgcataatcactgnctganatcgtagtatcaatcatgctgccat

SEQ ID NO: 13695 - DNA, 533 bp, Glycine max
  misc_feature (77)..(77): n is a, c, g, or t
  misc_feature (175)..(175): n is a, c, g, or t
  misc_feature (177)..(177): n is a, c, g, or t
  misc_feature (235)..(235): n is a, c, g, or t
  misc_feature (253)..(253): n is a, c, g, or t
  misc_feature (336)..(336): n is a, c, g, or t
  misc_feature (505)..(505): n is a, c, g, or t
  Coding DNA Sequence Number=SeqID_3916
aagacacaagagctacgatgaccctctcgccagtagatacagcagagtcgagactatacacttgcagcgtagtaccngaatactcctcaacgactgtagacgacacctctgcgtatcctcatcatgcgtcgcacggtgtctcatagcggaaacgacttatcacgctctcgagcangngactatctgccatcttagtgatatattcctggtctgcattccgcacacatactacgantgcgcctcgaattacatnctcgactcgtgacatacacacgactgatgtcacacaccacaactctataatatggtgaaggcgcggcgctcctatcaagacanacagatgcgacagtactcgactacagaccataatcagcacgcaatgaagatgtagacagactcctctgaccatcatatataacgtaatgacgcacgtcgtattgtatatctgacgcagtgacgcaccgaccactgctgctgactctcccgtcctattgcagaggagccntctgaagccgagtcctatgttcatatag

SEQ ID NO: 13696 - DNA, 561 bp, Glycine max
  misc_feature (62)..(62): n is a, c, g, or t
  misc_feature (113)..(113): n is a, c, g, or t
  misc_feature (121)..(121): n is a, c, g, or t
  misc_feature (147)..(147): n is a, c, g, or t
  misc_feature (150)..(150): n is a, c, g, or t
  misc_feature (158)..(158): n is a, c, g, or t
  misc_feature (178)..(178): n is a, c, g, or t
  misc_feature (180)..(180): n is a, c, g, or t
  misc_feature (203)..(203): n is a, c, g, or t
  misc_feature (209)..(209): n is a, c, g, or t
  misc_feature (261)..(261): n is a, c, g, or t
  misc_feature (272)..(272): n is a, c, g, or t
  misc_feature (303)..(303): n is a, c, g, or t
  misc_feature (329)..(330): n is a, c, g, or t
  misc_feature (333)..(333): n is a, c, g, or t
  misc_feature (390)..(391): n is a, c, g, or t
  misc_feature (443)..(444): n is a, c, g, or t
  misc_feature (447)..(448): n is a, c, g, or t
  misc_feature (455)..(455): n is a, c, g, or t
  misc_feature (457)..(458): n is a, c, g, or t
  misc_feature (487)..(487): n is a, c, g, or t
  misc_feature (489)..(492): n is a, c, g, or t
  misc_feature (494)..(494): n is a, c, g, or t
  misc_feature (498)..(500): n is a, c, g, or t
  misc_feature (503)..(503): n is a, c, g, or t
  misc_feature (508)..(508): n is a, c, g, or t
  misc_feature (526)..(526): n is a, c, g, or t
  misc_feature (532)..(532): n is a, c, g, or t
  Coding DNA Sequence Number=SeqID_3917
acagatgataagcacgtgtacacgaacggcacctagctccagcacaggcaggcacgcccacntatacactcatacccgccaagcgccacggcagcgccacaccactccagtcncacacacngcggacgccactatcgacaaacactnatntgtgttgnttgtcgtgtgtagtgtgtgngnttctaagagtggcgctagccgtncgtcgncgcgcgcgcgctgcgcgtgtcgtgcggtcactgtcacgactcctctcgcatngcatctggtgnctccgttgcgcgtgtgctgtgcgtgcgctcncgcgctcgtcgcgtcgcgtgccttcnntgncggtgtgtatggatgtcagtagatgtttattaaagttttatatacaactacataggnnctgtcctccagtcgctgcgcctctcgtgagaagggctgtgcgtcggttcatnnttnnctctttntnntactatatacacttatcgcgtgtatatanannnnangtgnnngtnagggngtaggggggggtcggagnggggtntgtgttagggaggtgtgcgcgcgggtctc

SEQ ID NO: 13697 - DNA, 115 bp, Glycine max
  Coding DNA Sequence Number=SeqID_3918
aatgatggtcctgttagtggacctctatctggttggatatcacctagtttcatacttaaaaataaacaaatgcttgctcaatgaatttgtaagtcagaatcaggaacttgaccat

SEQ ID NO: 13698 - DNA, 542 bp, Glycine max
  misc_feature (53)..(53): n is a, c, g, or t
  misc_feature (194)..(194): n is a, c, g, or t
  misc_feature (451)..(451): n is a, c, g, or t
  misc_feature (499)..(499): n is a, c, g, or t
  Coding DNA Sequence Number=SeqID_3919
tacgctggcgtttctagtatgacattgtggtagaggtagctgtatgatgtgtngacttatttgtgtgtttggcatagtatgttatcagtgtctagcatgagtgctagcatcgcagattgagaagtgatatgaggcgctttgtggtgcctattttgctctcatgaggacacattctatttagtatatgacgaganttgtgttgatgagatgcggctttggatcttataagagattacagcagccacgttcgcttatgaaggcatctttgttgtgattgtcagagatacgatacggcagggtcttagatagtaggagacattgtattcacactacacttacttgtatgagatcgctactatgtagcatttgttcactactacctcttatatattatggtatagaaataaaagagaagaaaatacaatagagtactatctctccgcgacacgtncgcgcgggggatgtattctcctcatatgtctatgtgagagcggcgcgncacgcttcaccgcggtggggtggtattctacccattagttatt

SEQ ID NO: 13699 - DNA, 459 bp, Glycine max
  Coding DNA Sequence Number=SeqID_3920
atgtcctagataagctccaccgcaatccgccctcctccgccatctcctttcctttctctagcgagcatcttcgcgtgagcatttttcctttctcgcggatccatgaccggaggtgctcgcaggcatggcggccgtggcaggtcaccgccgcgcaagttcgcccggcatgacgcagccggcagctccagccggtccgccatcgagtcgtggcggtctaagcatgggtgcgaacacggccgcctctcctgcagcaacgaccagagtgcgtgggctgacttccacgagctccaagaggtgcttttcccgcacaccaagaggtgccgggaggtggatgaggagctcctcgccacggagcgcgcggtggaggccggagaagaaggcatcgccgacaggctcgttgccgcaaagaaggaccacacctacgcccatgcttgccgcaagtcggcagagaagttctac

SEQ ID NO: 13700 - DNA, 591 bp, Glycine max
  misc_feature (34)..(34): n is a, c, g, or t
  misc_feature (136)..(136): n is a, c, g, or t
  misc_feature (182)..(183): n is a, c, g, or t
  misc_feature (234)..(235): n is a, c, g, or t
  misc_feature (458)..(458): n is a, c, g, or t
  misc_feature (520)..(520): n is a, c, g, or t
  misc_feature (522)..(522): n is a, c, g, or t
  misc_feature (533)..(533): n is a, c, g, or t
  Coding DNA Sequence Number=SeqID_3921
gttcttttactcatctatgctactgattgtatcnattttgtcttgtattctttgaattgtgcacattcttttacttatatgtgtctgtgttgtagattattctgtatatctttctgtttgttcgtgttatcatacnaaaatatatagaggtatactttctgctgtgtgttggtgtgcgcgcnncggcgcgagcgacggggggagatggggagtgggggggtttgttctcgtgtnngcgtggtggagttgatcaagtgggtggtgagatggagagtggtcagtgagagtagatgagtgagagtatagtgagtcttgaaatgagaagagtgagagagcacgcgcggcatgcgcatttccgatacgcgcaggaccacgcgcttgttgtcctctttgttctgtgctgtgttttgtcgttgtgtttagcgcttgtcgtctgtctgtagtgtgcggtattaacnttttagcgactcgctatcgaggttcagcgcagataagcacagattagatagtctataatatntntatatatattntttcggctaccgctcatgtgctctctgtgacgtgtcgtcgtagccactagacatccca

SEQ ID NO: 13701 - DNA, 492 bp, Glycine max
  misc_feature (219)..(219): n is a, c, g, or t
  misc_feature (339)..(339): n is a, c, g, or t
  misc_feature (458)..(458): n is a, c, g, or t
  misc_feature (467)..(467): n is a, c, g, or t
  Coding DNA Sequence Number=SeqID_3922
actgatcagcgaacggaagttacgaagaccgaacattcgaacaattcaacgccaacaagcaagaataatgataagaaagagtcgacaaatagtaagcaatcacaagttaagaaacaaatcaataacactaaattaagcaacaaaaacgatgaatcatcagcaaaagagttcattactgccgaatcgagttacgatagctcaagaactgtttcactcganaccaccgatactccgagcgtcatctcatcatcgaaatcaaactcatttaattcaactaatcaacctcctgtgatcatgttcgataataagaacaacaatccgagtaccacatttacattnggattttttgatgagaatgctcaatttcaaaataatttagttgaagagcatatgaacgaacagttcgattcgatcaatgtgaattcagtcaatttcataagtaaagaaactggaacaangaattcgangttagtcaaaaatccacagcatcag

SEQ ID NO: 13702 - DNA, 494 bp, Glycine max
  Coding DNA Sequence Number=SeqID_3923
tgaaacggataccatcgtgcccaaacgaaatagatcccgtctatgtttgctgcaatccgacacattggttccggatatgtcgaacagattcacctccacctccctactcaaaatttgccatggaaagactgaagcccgaagatcgtgcgccaagcgaagaacgtgtacgtgatcctagcatctttccagggtcactcagtaccgatggtgaagaaaaatcatcatcgggctggtgtcagttggcgtattgggagcaatcgcaaagagtcgggcgcttatttcctgtagagaatccggctgtgaatatattcgctgaacaaacgcgcggcgatggactatgtctaacaacattggcaatgcaacgattgtcagctacaccggatgtggttctgaaagcaagacaaaaaattggcttaggggtgacactaagtcgagaatcagatggtgtgtggatatataatcgttcatcggcaccagtttttgtacattcacca

SEQ ID NO: 13703 - DNA, 109 bp, Glycine max
  misc_feature (57)..(57): n is a, c, g, or t
  Coding DNA Sequence Number=SeqID_3924
cttgttgaaacagagatgctgaataacgcatcttcacactctattcgagagcaggcncagatttggctgtttagcttgaacttgcagcttcaacggtctgtgcggatgc

SEQ ID NO: 13704 - DNA, 490 bp, Glycine max
  misc_feature (324)..(324): n is a, c, g, or t
  misc_feature (439)..(439): n is a, c, g, or t
  Coding DNA Sequence Number=SeqID_3925
aaactgatactacaaaccctctcttgtattaggcatatagagtttatacggtgatgtgtagtcgccgcgcgagttagttcacaatatagctgatctagtctactcgcaatcgagtgcttacggcgttccaccgaactgacgcacggtaatgtatgagatcgtcgctatgtctgtgtttgctgtgtttcatagtgtccgtcgcgaagcacgactctattccgactcgatcaggacatccgtgcgacgttggatatagtatcatgtttcttaactcgactttgatgtgtctgtactgtatcttaattattgtatgttcgatcacgntcacacccagttagtcaacgcgtacgtacgctccgtgctataataacatcgtcgcgtctacgacactgagctctctacgtgtattacaatgttgttacgctgtgtctctcgtttntacgctcactcaatgtgctattatgtgattgaatatctccttgttactaac

SEQ ID NO: 13705 - DNA, 592 bp, Glycine max
  misc_feature (179)..(179): n is a, c, g, or t
  misc_feature (205)..(205): n is a, c, g, or t
  misc_feature (304)..(304): n is a, c, g, or t
  misc_feature (367)..(367): n is a, c, g, or t
  misc_feature (381)..(381): n is a, c, g, or t
  misc_feature (389)..(389): n is a, c, g, or t
  misc_feature (392)..(392): n is a, c, g, or t
  misc_feature (394)..(394): n is a, c, g, or t
  Coding DNA Sequence Number=SeqID_3926
acttatgtgttgttcgtgtgaccgcaccgcctctcccctacagatctgtgtgtgtggagtagtgttgtgtgttgtgccgcgctcgtttatgtatctgtgtttgtgccctcccgcccacccccacaatcttcgtgagtaacccgactcgaccacgagcaggtggctgtcatgctgaccancactacctggagatgtgcgttagtantttactcacgatctgtgcgctgtaaccgataccgacgcctctgcctgccacacgagccttgtcacggcgtgctggtgtggtgtgtgtgtgatgcctcgntcaccagctcttctcaatctgcaggcgagcttgtctctgttaccactgcctaactctctcccnggctccggtccccnccgccacnacncnatacttaaacatattcatcctgccagtgactgcgaacctgtgacgatcgatctggaaacattcgccgcgacgcgtgtcactgtcactcatccctcctctaccacacgactctcgcgcacacatctcacgcatccgtgcctgttggttgttgatctagtgtgttgtctctcgcgtgcttgatgtcgtgtgtgctctgta

SEQ ID NO: 13706 - DNA, 479 bp, Glycine max
  Coding DNA Sequence Number=SeqID_3927
gataacaagatcaccgtcatgctcaagtacattcccgtaaagatgcgtcttgatcccagcgaatcattcaacaaccaaggtacattgcgagtagatgtgcttgatgcggcagatcttccagctgcggaccgtaacggcttctcggatccttactgcaagttcatgctcaacgataaggaggtgtacaagaccaagacacaaaagaagactctccacccagcatggaacgagtactttgaggtacctgtacgaagtcgaacagcggctgactttgtcgtcaatgtctacgattgggactttggcgacaaggcagacttccttggcaagtcatccatcaacttggagattctggagcctttccagcagcaagaggtcacgcttgctcttgatggcaagtcaggcgccatccgacttcgaatgttgttcaagccagattacgtcgtacgatcccgtcaaggctcgagcacattctctggcac

SEQ ID NO: 13707 - DNA, 137 bp, Glycine max
  Coding DNA Sequence Number=SeqID_3928
ttgaatcagggattaaacattggttggttgcatttgccgcaggaggatggggcaacattgtccctacctgccttggtcccaaaaccaatctgttaaggttccttctaagcaatgggccaggtaatggcctttttcgg

SEQ ID NO: 13708 - DNA, 596 bp, Glycine max
  misc_feature (76)..(76): n is a, c, g, or t
  misc_feature (167)..(167): n is a, c, g, or t
  misc_feature (546)..(546): n is a, c, g, or t
  Coding DNA Sequence Number=SeqID_3929
ggccctggtttcactcgttgttacgcccggtagacgagtgtacaggagtaagttgtggggtagagagtcgccgccncagtatacacgaagtaccggagcgggtagcggagtagcatgtccacgtgttgtggcccgccggttgtgcgcgggttggtgctgcgcccgtncctcgttgtgagttgcacgacacagattatgagcgaggtaggtggctggccgtctggttggcgcccgttttctcccgcccgcccccccgcccgcaattttgttatccctgatacacaccaacgcttgtgttctttgagcccgatgtattgcccgttacccggccgccgtgtctccgcggctgtgttgtatgaactcagtcacgcctgttcacgaccgttagtacccgttgatcacacaattagcaacgcaatgtcaccaggttaatccaccaacaagtcccaacgtgcgccgcatgtgagtgtgtggggcgcggcggttgttgtgtgacctggagcgccagttgccagatatgggacccacggcgcctttgcccgccgncatttagattttagaaaaatgtcgtgtcgtctataatttgttgtgtgcct

SEQ ID NO: 13709 - DNA, 523 bp, Glycine max
  Coding DNA Sequence Number=SeqID_3930
aagcacaaggttggcccaaacttgaatggtcttattggccgcaagacaggccaggccccgggcttcccttacacagacgccaacaaagagaagggtatcacttggaatgctgacactctgtttgagtacctggagaaccctaagaagtacattcctggcacaaagatggtgtttgctggtttgaagaaaccccaggaacgggctgatatcatcgcctatttacaagaatccaccaagtagatgctcaattctatcctaatatcattgttatttatttcttagtaattgaagtcatcctggtcatgaggctcatggactttgtcaggaccatagaaactggtagatgtggtctgctaaatgttgtgacgtgagtggccgtaaaagtattcgcacactgtgtgtattgtgaaattattttattgggatgaacgatgttggctgagccaactaatttattggccctggtgtttgggcaaacgaaaccaatctcattaaaccaaataccctgtctctttgggagatg

SEQ ID NO: 13710 - DNA, 544 bp, Glycine max
  misc_feature (63)..(63): n is a, c, g, or t
  misc_feature (74)..(74): n is a, c, g, or t
  misc_feature (134)..(134): n is a, c, g, or t
  misc_feature (136)..(136): n is a, c, g, or t
  misc_feature (190)..(190): n is a, c, g, or t
  misc_feature (286)..(286): n is a, c, g, or t
  misc_feature (305)..(305): n is a, c, g, or t
  misc_feature (323)..(323): n is a, c, g, or t
  misc_feature (363)..(363): n is a, c, g, or t
  misc_feature (392)..(392): n is a, c, g, or t
  misc_feature (424)..(424): n is a, c, g, or t
  misc_feature (441)..(441): n is a, c, g, or t
  misc_feature (443)..(443): n is a, c, g, or t
  misc_feature (459)..(459): n is a, c, g, or t
  misc_feature (461)..(461): n is a, c, g, or t
  misc_feature (465)..(465): n is a, c, g, or t
  misc_feature (475)..(475): n is a, c, g, or t
  misc_feature (478)..(478): n is a, c, g, or t
  misc_feature (480)..(481): n is a, c, g, or t
  misc_feature (503)..(503): n is a, c, g, or t
  misc_feature (507)..(507): n is a, c, g, or t
  misc_feature (518)..(518): n is a, c, g, or t
  Coding DNA Sequence Number=SeqID_3931
cgaagcgtgtagagagtaagcgactcgtatgcgactgaaacgctcactattgcgactatatcnctcgtgtcgtntgatctacgtgagcgcgcgcgagtgcggtgcagtcgcgtacgtcgattatcgcgcgctantncatgactgtctcgctataattatgataatctttcggatgtagtcggcgttgcgncggcgagatcgatacgtgctatacgtcattatttatatgcgcgcgctgcagcggcgtgtcggcgtgacatatgtctatgcgctgtatcatggatanatacagtattacgtacgcncgagacgcattgaacagntatgacactcgctgtacgcccgacgacgtacgtcgtcatnatctcatcatatagcctgcgtcgctcgtncgtgctcgacgtcgcatatcgattcacgatantcgcgcggatcgtgtantngcgtccaccaagtgantncgtngccgtggctntananntattcaatcatcatactactancacngtcactacacngacgtgatcgatgcttcgacggcgca

SEQ ID NO: 13711 - DNA, 571 bp, Glycine max
  misc_feature (267)..(267): n is a, c, g, or t
  misc_feature (311)..(311): n is a, c, g, or t
  misc_feature (335)..(335): n is a, c, g, or t
  misc_feature (403)..(403): n is a, c, g, or t
  misc_feature (470)..(470): n is a, c, g, or t
  misc_feature (485)..(485): n is a, c, g, or t
  misc_feature (497)..(497): n is a, c, g, or t
  misc_feature (516)..(516): n is a, c, g, or t
  misc_feature (518)..(518): n is a, c, g, or t
  misc_feature (534)..(534): n is a, c, g, or t
  Coding DNA Sequence Number=SeqID_3932
gagtagcagcgcgttcaatactgattgatcagatagatactaccatcattgcacagtctcgcgtgtcatcagactatgctactaggaagttatctcattatctctgtcaatcaacatattacagaagcacaaataatatcgtcacgcttatgtatgttcgtcacgattgtctctagtcgctaactatgtgatctcgcgcgcgcaccgacgttgtctgtctgtgactccgagcgttttctatataaatgagcgtatcttcacatatantagtcatacattaatatgcacgattagatctcacaacgaggtanctttgtggctaggggaattataancgcgaatcacacgatcgttctgctgaactatctcacacctcacgtctgactactctccgctgtgtatnggcgttgtggatgcttgtggtgcagcgtcgcggagcacagctcgatatcgatttataggagtgcggntgatatctctacgantatatctacacnataagcatcaacgagacgncngtacacacacgacttncttcgtatgagtgtgattctcatctacgcactcataa

SEQ ID NO: 13712 - DNA, 558 bp, Glycine max
  Coding DNA Sequence Number=SeqID_3933
cctccgtggaggcaaagatgatcgtggctagctactaatgaccttttagacgcccaagcagaggatggaacattaggggagcgcgctgcttaaagcctgcttcctgttgaagaacagaagctgccccctgacttacatgctcttgctgaggaacggtgagatgacaaagaagcctgcttataccgggaagctaacaggtttaatgctcaagaatgctctggatgcttgagagcatatcagacaattagaacgtgggcaaagatggctggcattggacccaaccttgaaagctcaaattaacgcattcctgctgaggacactttcttccccttctcttgatgcccgaacaactgcatcacaggatattgctacagctgctggcgttgagttgcctcatacacagtggcctgaattgataggatccctggtgactaaggctcatcagcttcctgcccctacaagacaggcaacacttgagacccttggatacatctgcgaagatgtttacccacatgctgtataccaggatcatgtacataacatactcactgctgatgt

SEQ ID NO: 13713 - DNA, 165 bp, Glycine max
  Coding DNA Sequence Number=SeqID_3934
ctatttttcatctgttttgagttgcatttcttgtttttttattctttgttaaatggtttacctactatttatactttgtgttttgtcttggtgttcatctcgttagaacttttttttttatcatttcaaattgtgttgtcctttgattgttgcttaactttcatg

SEQ ID NO: 13714 - DNA, 581 bp, Glycine max
  misc_feature (142)..(142): n is a, c, g, or t
  misc_feature (151)..(151): n is a, c, g, or t
  misc_feature (176)..(176): n is a, c, g, or t
  misc_feature (242)..(242): n is a, c, g, or t
  misc_feature (331)..(331): n is a, c, g, or t
  misc_feature (336)..(336): n is a, c, g, or t
  misc_feature (338)..(338): n is a, c, g, or t
  misc_feature (409)..(409): n is a, c, g, or t
  misc_feature (413)..(413): n is a, c, g, or t
  misc_feature (501)..(501): n is a, c, g, or t
  misc_feature (511)..(511): n is a, c, g, or t
  Coding DNA Sequence Number=SeqID_3935
gacgtgctctgtggtgtacacattcgctatatacgtcgtcgactcgccggatcgtcaagtatagcgcgtcgggtgtcacatcgtcaatacactagataagcgtattactatgatgtacactgcgtattcactgatcgcgacngatatgtantggatcatacacacgcgtcagatgnaatagatgtatagtgtcgaactcagctgctatatgctctgtatgatgcttagacgcatcgtcgtcntcatcatagctgacttatgctgactgtcacacatctcgcgtccacactatggtatatgcatggaatgtatatcacagcaataatgcaantgacntnctcatgagtacatagcaatacatgcaactgcagtaagtacgagcattcgtcactcgcgtccaggcggcagncgtnagcgtacaagatgattcgtctatgcttatcagatagagatacgtctacactagtgtgatctgtgcgtgccgctcatctctgtgtctantcgtgtccanatacgctatgtgcgtgctgcctcctcgtactcacgtactcgatgaagtactacttgatacgtcgctcgtg

SEQ ID NO: 13715 - DNA, 426 bp, Glycine max
  misc_feature (73)..(74): n is a, c, g, or t
  misc_feature (103)..(103): n is a, c, g, or t
  misc_feature (112)..(112): n is a, c, g, or t
  misc_feature (144)..(144): n is a, c, g, or t
  misc_feature (186)..(186): n is a, c, g, or t
  misc_feature (203)..(203): n is a, c, g, or t
  misc_feature (298)..(298): n is a, c, g, or t
  misc_feature (311)..(311): n is a, c, g, or t
  misc_feature (393)..(393): n is a, c, g, or t
  Coding DNA Sequence Number=SeqID_3936
taatggaaggcggacattttacaaaataattgaatataattaagagttaatattgcggccgcgtgccatccannaggtactaacactgaaagcgccaccgcgngctgccagntcccaactgtcgggtttccctctcacacgagnggctcaaagggtgaaacctcttgggaggatgttggggggtantaacatccattcccttntctccaggtcgggtgatgccgcgcctgacattgccacccgagcctttacagcaggcgcggatgcctgaattagaggacaaaatccggcggaagcntataattcagcgncccccaagatttgcctcattttatatagcctgtacggctcacctgtggagaggattaaccgcaagataggagacaacaggtnctcgaggcgccgccctgctcataaatgtaagtc

SEQ ID NO: 13716 - DNA, 556 bp, Glycine max
  misc_feature (170)..(170): n is a, c, g, or t
  misc_feature (274)..(274): n is a, c, g, or t
  misc_feature (317)..(317): n is a, c, g, or t
  misc_feature (345)..(345): n is a, c, g, or t
  misc_feature (509)..(509): n is a, c, g, or t
  misc_feature (511)..(511): n is a, c, g, or t
  misc_feature (520)..(520): n is a, c, g, or t
  Coding DNA Sequence Number=SeqID_3937
tcacatatatactctttcttctcccctcctgcttgtctctaccctcataatatcacatatattccgctcagagtgatgacgcgcacgtagttagttatctttccacccgctagtgacgccatgatcgactaatatgtgacaccactcgatgtattatgcggccaatatgnggtggcgtacgatgtcgcgcactgtacatgtccatgtatactcaccgattatatttctcacccacagcgatctagctggttatcctcccgccttcatatcactnatcgcacacccgtctatctctctgtatgcgcgcacattctatnatatttgtacatatcgacgacttgtgtnatgtgctctctgagcgccacacgtacctgtatcttcttacgcccctctatagactagttgtctcccgcccttattgattattatcaccgtgcattgattatactcacaatgatatatgccctgtaggtgagtgacaccccaccacgtatgtgtgtgtatcctcncntgcgatgtngatcaccgcgcattgttatatcaccccgtggacgac

SEQ ID NO: 13717 - DNA, 569 bp, Glycine max
  misc_feature (34)..(34): n is a, c, g, or t
  misc_feature (157)..(157): n is a, c, g, or t
  misc_feature (209)..(209): n is a, c, g, or t
  misc_feature (226)..(226): n is a, c, g, or t
  misc_feature (305)..(305): n is a, c, g, or t
  misc_feature (330)..(330): n is a, c, g, or t
  misc_feature (347)..(347): n is a, c, g, or t
  misc_feature (360)..(360): n is a, c, g, or t
  misc_feature (391)..(391): n is a, c, g, or t
  misc_feature (404)..(404): n is a, c, g, or t
  misc_feature (426)..(426): n is a, c, g, or t
  misc_feature (428)..(428): n is a, c, g, or t
  misc_feature (447)..(447): n is a, c, g, or t
  misc_feature (462)..(462): n is a, c, g, or t
  misc_feature (519)..(519): n is a, c, g, or t
  Coding DNA Sequence Number=SeqID_3938
acacgtgagtcacagctcgaggacagtatattantaaactagatacagcatgaactactgattatacgacgtcactagtcgctgacgctcgaatacattacacgcgtggtccgtatatgatgtgattatctatctcacagtctcatcgtctccctcngctaccgaaccatcatataaaatatatctctactagtgtaccgcgagctcantaaacatcagtcgcganattgctcctacggacgctgcgcgccttcgccacgctacgactgataataatcatataataatgacgacgttgcagcagngcgcgagcgctgtatatgctcacanacacgtggtgcgtcgantactaatcactanatctgctcgacgtattatcatgtaatgctgncgatgtgcgttgntggctatatatctactaccgcngncgcatattagtaacactcntcactgatacaaatntacagcagctctacgcgcgtgtgtactgatgatcatgtgtcgtggcgtcgaatctgngattatatatcaatagacgcacgatgtgtcgtacgagagcgcgcaacagc

SEQ ID NO: 13718 - DNA, 550 bp, Glycine max
  misc_feature (207)..(207): n is a, c, g, or t
  misc_feature (334)..(334): n is a, c, g, or t
  misc_feature (442)..(442): n is a, c, g, or t
  misc_feature (503)..(503): n is a, c, g, or t
  misc_feature (506)..(506): n is a, c, g, or t
  Coding DNA Sequence Number=SeqID_3939
ttctttctacggtgttcctctgtcctccgctcggctccactcacgcgtgctctctagccgtcgtgtgggtccttcgtccacatagtttcgaactctgtcatctcatcattattctccatcgtactacgccatatctccattcttcacattcactacaccataccatagatagtgaaggcctgcgagggacgatgcgggagatgaganaagagaagcgcggacgcgtaggagacataggcgctataagacagagagaatagcacagacagcagagagactatagacagtacataacatacatgagaactacatacactacatacaattgataatnatgatagcaacgagcaagtgccacacaacacaacagagaacagcgcagaacggacacagcagacaagcgagacacgagcgacaacagacacgaccacacaacagacanagcacacataagagataataacgcacagcgtgtcgcatatcacacatatgatatacacttnaanagacaaccatataatgtaagacatatgtcgacatcacacacgag

SEQ ID NO: 13719 - DNA, 587 bp, Glycine max
  misc_feature (30)..(30): n is a, c, g, or t
  misc_feature (117)..(117): n is a, c, g, or t
  misc_feature (176)..(176): n is a, c, g, or t
  misc_feature (178)..(178): n is a, c, g, or t
  misc_feature (205)..(205): n is a, c, g, or t
  misc_feature (227)..(227): n is a, c, g, or t
  misc_feature (273)..(273): n is a, c, g, or t
  misc_feature (285)..(285): n is a, c, g, or t
  misc_feature (330)..(330): n is a, c, g, or t
  misc_feature (334)..(334): n is a, c, g, or t
  misc_feature (419)..(419): n is a, c, g, or t
  misc_feature (455)..(455): n is a, c, g, or t
  misc_feature (555)..(555): n is a, c, g, or t
  Coding DNA Sequence Number=SeqID_3940
gtgacctagagagttagtctgtgatagaanactgatgcatgagcatgcgtgcgtgtgggcaagagttgtcttgacgggtcttatgtacactatatctgcgggtgagggctgcgcagngtgtgatgtggtgtacagatactctcgcgagtacacgctctatgtatattctatagcgnangcgcatgtatatctctctctttccgcntgtaccagggtgggtatcctangcggctgtggagtgcacaaatgtggtactgtcatgtcaatcacgtntatcagagtatngcccatgtagatctgagtaagacgcttatgtacgagtaaaaaganttantcgcttggatgctcgcgtcagaatatagagagagcacttctagatcgccactagagacagaagaagagaggagagatatatatgnggatatttctccttcgtcaggcccgctcggtggggngtatgcgacatcatgatgtttcgatgaggagaggcaggcctccgcctcaaacccggcagggtgaggacgtccgccacacgccttgtgtcattggcagttntcgggtctccctatcatattatgtgcgacgaa

SEQ ID NO: 13720 - DNA, 414 bp, Glycine max
  Coding DNA Sequence Number=SeqID_3941
gaaaactaattagatcactgtgaaatgttaaaactgaataccatattttgaccttatcattttttagtattttagtacctatatttataatatttttctgattataataaggaaagaagaacgaacaatcaggtccaccagaagtgctttaatagattcatgacccaagcccaattagattttgttataatatttattttcggtttttccaattttccccaaaatttaatacaattggaggtagctccattcattttcttggacttggaggcttcgctgaagagggaggtggattccgcggcggttgcgtggaggaagaggatctttgttgaagggggtttgctgaaggcagctgaggttgatgccaggggtttgattcttttcatcgccatcttcgggatccccactgttttc

SEQ ID NO: 13721 - DNA, 422 bp, Glycine max
  Coding DNA Sequence Number=SeqID_3942
ccaaagcacagcgagagagaaagtaaagtgagccatgtctgcctctgcttcctcccttttccttttcttccttcaaccctaaatccctccctctctgcatttcccgctccgcctccgttctcccaccttccctctccttcaaactctactccatcttcgcttcctccgccgtcaaatgctcctcctcccccgcccaacacccgtcgcgtttcgccagaaacgtggccgtatcatcggatttcgaggtggaggaagacgacgtgttcaccgacgatgactctcccccgccgcagcaagagcgcagctcctccttctccgcggacctcaaactcttcgtcggtaacctctccttcgatgtggatagcgctcagctcgctcagttgtttgagagcgccgggactgttgagatggttgaggttatc

SEQ ID NO: 13722 - DNA, 483 bp, Glycine max
  Coding DNA Sequence Number=SeqID_3943
aatcacaggtgtgaggactcctctctaagtgatgatgttattgggcctaatatggaagaaaattgtccacagttctatgaaccttatccatcgttgattccaatgaaacataaaagtaccataacatttaatgggaaaaatcttgatcattataaggatgaagttttcagtgcaggcaatgatgaactcaatttcaaaaccaaagtgttcaaagaagacagatctttctccgtttctataccagagttccctgcagaagataaagagactgttcctctgggtatttacattaaagtgaatgaaaaaaagattgacagtaaattaaatgttaatctctacaactgcatgtatggcagaagtgactgcagcctgtgccttgctgctgtttctgaataccactgtgtttggtgtaatgacaaatgtgtatacacggatatgtgtgtggaacaatctgctgagtgcccagctcctgaaatcactgat

SEQ ID NO: 13723 - DNA, 327 bp, Glycine max
  Coding DNA Sequence Number=SeqID_3944
ggttaaacgcactgttgttcgtctaagggattgtggctccattcctggaagttcggagaacacccacatgggtatgatgccctatagaatgtggaaaccatcattaattgaacgcgtatgagcagacgatgtatacaggagagctacgactcactgccgatagaaatcaatatataggaatcggacttatgagtatattcaaatcccattataccctaccaatatttatgcagaagtcccttgacctggaagaatacatctcgtgagctgatcattgagtcatggccaaagtgactactcatggccactctgctgaattatgagaat

SEQ ID NO: 13724 - DNA, 564 bp, Glycine max
  Coding DNA Sequence Number=SeqID_3945
gtactgtgatcgagcacggcttctggcaccataagaccaaagaaaaccttgaaaaaggggtactccgcggatggaaaggaacatcgcccgaaaaaaaagcgccccccacccccccctcctccctttctttttccctttccgggggaccaactccaggggggccccacttagtcccagggcacacacaccgggggccccaaaaaaatatttcccccgggggggggggggggagtccctccaacaaccctttttattaatttcccccaccccccacccaattgtcttttcctattttgcccccccgcgttttccctcgcattccctattggccccccccccgcgcctatttttacccacacccctcttttcccccactcccccattttgtactcctcgcccctcttgcaccccaacacccccgtttcccccgccccacccaatttcccataaaccttatcctgaaggcgacgccaccccaatattcctgccctcttatttgcgcgaccacgccctctccccccacttattttctccccccctgttcataattacaccctcctcaca

SEQ ID NO: 13725 - DNA, 558 bp, Glycine max
  misc_feature (147)..(147): n is a, c, g, or t
  misc_feature (161)..(161): n is a, c, g, or t
  misc_feature (408)..(408): n is a, c, g, or t
  Coding DNA Sequence Number=SeqID_3946
gagtcgtatgactatgtcaacccaccccacccgcgcaacgcgtatgttagcatgcatgtccagatgagctcgcgtcggtcgcgcgctacgggatggtcatggaggatcttgctccttctgatatctgcgctgtatgatactacgagntccgaacagtgagnagcgcacatagaataacacgtggtacccgaggcgcaggagtacatcaatgagagaatgacaccaccaacacagactcggccaccgccacgaacctgccactacaagtcatcaccacctataactctcacttctctcttctccgctagtacgatttgacagcgcaagagatttgaaagaaggagcgctctaaagacaccagcatatatgaacaatgcacggaactggcgcgggtgcggccgcggcggnatcgtcgtgtttgtcgtatgcgtccgccgccatgtcagtggcgctgtattgttgctagcgaccagctatgtcgtgctgcgtgtgggatgacgccgtgtcgtgagttggctaacgcctcgacccctgacgcatacctcgacgatggcacga

SEQ ID NO: 13726 - DNA, 250 bp, Glycine max
  Coding DNA Sequence Number=SeqID_3947
tttctgaatttttcttcgcttttagtacccatcttcggttttattacaagattctgattttcgacgagcttgatcgatctaaattctcaagatctatggcggaagagcatcgatgtcagacgccggaaggccaccgtctatgtgctaacaactgcggcttcctcggcagctccgccaccatgaatctctgctccaattgctacggcgatctctgtcttaagcaacagcaacaagcttccataaaaaccac

SEQ ID NO: 13727 - DNA, 192 bp, Glycine max
  misc_feature (72)..(73): n is a, c, g, or t
  misc_feature (79)..(79): n is a, c, g, or t
  misc_feature (143)..(145): n is a, c, g, or t
  misc_feature (147)..(148): n is a, c, g, or t
  Coding DNA Sequence Number=SeqID_3948
gtgtgcagcagatggccattgtgcagcaagtggttaggcgagaatgtgcagaatgcgcggttgtagccgtgnntcgcanagttgcagctgtgatagatagcgacatggtcatggtcctgtcctatgggaaactagtggaatannntnncccttcagagcttatggaggccaactcttggttctgtaggttgg

SEQ ID NO: 13728 - DNA, 274 bp, Glycine max
  Coding DNA Sequence Number=SeqID_3949
tgatttgcgctgctattgccagacacttaaatgtcactctcatagttccagagctggataaagcctctttctgggctgattcaagtgacttcaaagatatatttgatgtagatcatttcattacctccttgagagacgaggttcgaataataaagatactgccacctaagatcaagaaaagagttgaactaggattattatactcaatgccacccattagctggtctaatatctcatactatgaaaatcaggtccttcctctgttgctgaaaca

SEQ ID NO: 13729 - DNA, 595 bp, Glycine max
  misc_feature (111)..(111): n is a, c, g, or t
  misc_feature (154)..(154): n is a, c, g, or t
  misc_feature (267)..(267): n is a, c, g, or t
  misc_feature (276)..(276): n is a, c, g, or t
  misc_feature (368)..(368): n is a, c, g, or t
  misc_feature (408)..(408): n is a, c, g, or t
  misc_feature (485)..(485): n is a, c, g, or t
  misc_feature (511)..(511): n is a, c, g, or t
  misc_feature (515)..(515): n is a, c, g, or t
  misc_feature (523)..(523): n is a, c, g, or t
  misc_feature (549)..(549): n is a, c, g, or t
  misc_feature (553)..(553): n is a, c, g, or t
  misc_feature (565)..(565): n is a, c, g, or t
  Coding DNA Sequence Number=SeqID_3950
tacgtctagcgcaccgatgtgcaaaccacacgctgcacgacacacaactatccaacactcattgctctgctcatgtcgtctcttctatcttctgcctcactcatgatcttncgtcatctccatactacgacttcatgtgatgcgtctatactcnatatctcatcgtatcagatcatccaccacatactctctatactcactactgtatatacatcctctctctattctgctcgtctctcatctcacatctcatctctcatcgctacntctgtctcnacgtttgatatgtcgatcattgactctattctacttattatcaccctgcatatacatcgatatagcatgctcccaactcgcactgatgacgntatgaaatgagagaattagtgattagttgtatgtagtgangtccgtagtcgatatgctagctgtgacgactccactctacacctgctccgtacagctactctatccgtatatacgcnagtagcgtgactctcacagcatcatncccntacgtcgnctgatgacactcaactcgctacgcancgcntcgactagagtncatacgtacctagaaactaccatcacctac

SEQ ID NO: 13730 - DNA, 590 bp, Glycine max
  misc_feature (396)..(396): n is a, c, g, or t
  misc_feature (529)..(529): n is a, c, g, or t
  Coding DNA Sequence Number=SeqID_3951
acaaactaactcatacatcggctccataacataatataatactcaacaccccacaagacagaacaatctataacatgtatatatatttcatatcttttcctacgtctttgccagccgtcgatggcgtgtctctgcgcgttcctggctcggcgctcattgtcgctgtgttcgcatactattgaacgctatgtagacgacgaccaacgatggatatgacactccgatcaagcgctgatgctcactatatgtgctccgtgtcggtgctctgcgtcagatcacaacaccgcgcagacatagtatatctgacgcgacactccaccatctcttcacaatacctcttccagcacgtcacactccaacctcgtcctctacctctacgctcttactttctcacgncatcctacctctacttgataccctcgaccctcactctcgtattctttcctgttcattctcataccatgcacactctgcactctcatatctctcaacactctcaacaaccgcacactatctactcacacctctntaccattcgacaagcatcatgtatacgcacaaccatatcgtcgatatctcgtgtctacact

SEQ ID NO: 13731 - DNA, 406 bp, Glycine max
  Coding DNA Sequence Number=SeqID_3952
ttcaccaccgtctagctagctcttgttaggtcgatcggcaatggagtccaccaaggctctcttcgtgctcgccgttctcctcgcgtcggccgtcctcctcgccgccgcggcctccgagcaaactcatgacaaggaggggaaggtggccaccaacggtgccggcgtccaggacggctggggtggcggcgggcgcgggtggaggggtacccggggccgcgtgggcggcggctacagggccctgcgggccggtgggagctgcttgccgccggtgggtacccacggcgaactggcatccgaatggttgcaggggaccgcccaaacaacggtccccggtagggccatggggaacccccacctggaagggggaaccaaacttaaacttaagactgggcaaaaggtgggccaa

SEQ ID NO: 13732 - DNA, 512 bp, Glycine max
  Coding DNA Sequence Number=SeqID_3953
ttgcagattccagcggcatggccgatatgcagtgcatgcatggatgatattcattcatgatgcatgcattgcgctgcctatgttcgcattttaggagggattgatcggttgatgggttgagattttcctttccatttgttttttcacttgcttctcttgaggcaggggtgtgaggagaggacgccggagcactcagctacaaaggttgatgcgctttcgttctcttccacaaatggagaaggttgatatagataccagttcatttcgtttgctgtgactccagttcagttgtctacaaatgctgctggcgatgctgaattgctgatcacatgcatgattctgaagaagatcgaagataagaagaagattaaataagacgccgatctcatggattattctgccgggatgttgcttttcgttccgatacttgtattgtaatgttgctgtccaggactatggtttctgttcttgtgcatgtactgtagctggtttaccccagcatgacgatttta

SEQ ID NO: 13733 - DNA, 566 bp, Glycine max
  misc_feature (107)..(107): n is a, c, g, or t
  misc_feature (212)..(212): n is a, c, g, or t
  misc_feature (439)..(439): n is a, c, g, or t
  misc_feature (467)..(467): n is a, c, g, or t
  Coding DNA Sequence Number=SeqID_3954
gtgtgtatgactcgtcgtcatgtattgacgttaataccataaacatacactcaccacaccactcgtcttcctctctccacactgcgatcccaataatcgttctgtgncgtccacacgtactagcgtacacgcgccgccaacaatgactggactcgtccatcaaccaaacacttccctccatcacccctccactgacccttccctccacactnccacatcaccctccacctctatgtttataccaacctcacctaccctctctcacttctgcctatcatattaatatctactaaccattgcctacgcctccttatatattctctatcactgcttcgacgccgccgatctcgcgtgatacgaatgcgtatctcactcagcctccctctcctccatcataacgctcacagtctccactctcctctccctcccactctgattntgtcctgcgtcgtgaacgccaccccgtncccgcttcgcgcgtcgctcgtacctatcgtcgccgtacgcgtgttgcgtacactcttactttatttctcatctctatctcattataccttgtccacatc

SEQ ID NO: 13734 - DNA, 556 bp, Glycine max
  Coding DNA Sequence Number=SeqID_3955
tgagacgccgttttgctttggttatactagatgtgtgattattctcttttggtgcctctctcctctttcagctccgatggccagcctgtggcgcgcggcaaccggcttgacggacaactccaccgattacgacggagtcgagttctggtcgaacccttgagcggaccggctggctcaccaagcagggagagtacattaagacctgtcgccgtcggtgagtcgatctcaagcctggcaagctcttctgggtcatggactccgccgtcacgcgtgcgtgtcgtccacgcggtgtggcccccgtctccacgtgcctcaccgtgacatgcgcccaagacatgctcatcaagccctgcgaccttctagttgtccacgctctccgacaccatgtacttcatggccgactacaaaaaggacaaagaggacaggatcaattctatcaagcgctacgtcatccagcactacacatccggctccgatgtcccgatcatggagtacaatatccactacttgaagagctggcaaccacgcgctctggatacacgctcctatgtacgag

SEQ ID NO: 13735 - DNA, 305 bp, Glycine max
  Coding DNA Sequence Number=SeqID_3956
ttttgcattagggttttcacttcggctgctgctagtgagtgagcaacgaatcttcaaccccaaccatggcgacgaaacaagccaaagcgtccgtgcaatgcttcggaaggaagaagacggccgtcgccgtcacccactgcaagcccggctgcggtctgatcaagctcaacggctccccgatcgagctgttcaacccagagatcctccggttcaagatcttcgagccggtgctcctcctcggaaagcaccgtttcgccggcgtcgacatgaggatccgcgtcaacggcggtggtcacacttctcag

SEQ ID NO: 13736 - DNA, 563 bp, Glycine max
  Coding DNA Sequence Number=SeqID_3957
aggaggttcaccaggaccattaccacaccaccgagcaacctatcctcgacaaggaggttcttcccacccagcaccacaccaacatcatccccgttgagcaccgcagctacgagcacgacaacaacgacgaggtcgaggcccgtcttgctaaggagcgtgccagctacgtcgacaccaccgagaggattgagggcgccaccacccgcgagwttgyccccgtcgtmgcagscsagcacaagcaccaccacgtbcacgagaccattcagcccgtgatccagaaggagaccatcgagccccacgtcacccacaccaccgtccccatccacgaggtccaccacaacgccgcccagcaccacgccgcctctgccctccccgccgtctccatggccgagtttaaggcacagggcggttccctcaccggtcgcgaggaacgtcaggacggcttcatcggcgagcccaagtctgccgctcacaagaccgcccacgagcacactcttacccactaagcgtctcgcctacratcttcacgtttaatgtttatgccaccaaaaagctgtctcacg

SEQ ID NO: 13737 - DNA, 491 bp, Glycine max
  misc_feature (56)..(56): n is a, c, g, or t
  misc_feature (82)..(82): n is a, c, g, or t
  misc_feature (108)..(108): n is a, c, g, or t
  misc_feature (169)..(169): n is a, c, g, or t
  misc_feature (182)..(182): n is a, c, g, or t
  misc_feature (221)..(221): n is a, c, g, or t
  misc_feature (285)..(285): n is a, c, g, or t
  misc_feature (397)..(397): n is a, c, g, or t
  misc_feature (399)..(399): n is a, c, g, or t
  misc_feature (415)..(415): n is a, c, g, or t
  misc_feature (424)..(425): n is a, c, g, or t
  misc_feature (430)..(430): n is a, c, g, or t
  Coding DNA Sequence Number=SeqID_3958
cgtcacgcacaatgtatcgcacacgcatatagtctgttccgctcgcgagattgttnttactacctctcttttacctacgctngctagtcatatgatgtcactcatgtntatccacgcgcccgaccaccccggcgtgtacagacttatccgacgcgacatatctacattnacacacatatgtncgtgattatcgagcgattattatctcctccgcctttccnctataccggcggggattagtgttgccgagtatatacctcataatgttcatgcggcatcatagtngtttgtttctgcttttttctagtatattatcacccgatgacgcgagtcagagtcaatgtagacagcagacaacaactatactccgctcagtccccgtctcgccgactcgtgngngtgctccggttccatnaacacgcannagganagtttcgcgccgttcttacgcgagtgagtggtagctatagtattcttatccgcgtgagcgc

SEQ ID NO: 13738 - DNA, 543 bp, Glycine max
  misc_feature (418)..(418): n is a, c, g, or t
  Coding DNA Sequence Number=SeqID_3959
ggtgcgttcctaattgtatgttctcttctcctatctctcctatatacaatagatcatctcctcgtcttatcggtcacactagagctcgacagatagattatattgagtggagtagtagagaggaagaccgtatcatcattagtcctcccacattaactcgtaataggcatatatgagactagagtatcaaattgtcgcgttgtatgaggtgttaggttacgacgtattatagtaataccacaacatatataaagatatgagatagatctacatgctggggcgcactgttcctctgtctgtgcccttcgtcatatccaccacgctgcgagactagtttctaatcagtagctgttcaggggatggtcgtaggctgtctgtcgatgcgcgtgctgcgctgcttcaccttatatggacgatntgaagtagagacagagcattatccggtgactcctaaatcgaatatgctgtgagcactgatctgattttcgttcgcctccgtctctacaatagtaagacctgatatgtgatacactcagtctttgg

SEQ ID NO: 13739 - DNA, 477 bp, Glycine max
  Coding DNA Sequence Number=SeqID_3960
ttgagtcccttgttctctagcaatactcataacggaggatttttcagtggcttcacacctagatatttctcaaacgtcccccatatgcaagatggcaacaagacatttggaccagatgattttttattgagacctagtccaactcatatggatattgacgtcaacgcaagattcgaaaaagcagtcgaaaacatgaaaatggaactcagaaataaccctactcaacatttgggtgatcatggattggatcaaagtggattaaatcttgatatcgatcttattgatgacagctatttgcatgccccaatgaccaaatctcctcatctccaatttgtcggaagtcaaccaaccagtaaatgctcattcaagaaatttggagagtggactttgagtcccaacgcatccttcttgccaagaaagaagttctaagtgttttattcagatttttacgctagagtgtgttaattattcatccca

SEQ ID NO: 13740 - DNA, 478 bp, Glycine max
  Coding DNA Sequence Number=SeqID_3961
gaccaatgttttggcgaagtctcattgtgcagaatccatcatctgacatctacaaccctcaagctggtcgcatcacaacctgcaccagccttgacttcccagccctctggcttctcaaactcagtgcccattatggatcactccgcacgagtgctatgttcgtgccacactacaccctgaacgctaacagcataatatacgcattgaatggtcggacattgctacaagcggtgaatcgcactggtgagagagtgactgatggagagctgcaagaggcaggcgtgctgatcgttccacagaactgtgcagtggctgcaaaataccagagcgatcactgttagcatgtgatatacaagatcaatgatggaccctcgatcggaaacctatcacgggcaaactcatcggtgaacgcatagtcatatgaagtgattcagcacacttttatcctagagagccagcaggccacgctggtgaatat

SEQ ID NO: 13741 - DNA, 534 bp, Glycine max
  Coding DNA Sequence Number=SeqID_3962
gggacattggcaacgtcgtccacgccacggccaggtcctcgacggatccagctaccggcccggcatggatcaatcgtccaatcatcaggaggttcagcgctcaactcttgaagaaggcccaggccgatccatccaagaatggcgtagaactgattctaaattcctccagcagcacgggcaaccctgaagccccattcgctgttactcgcaggttgattggcactggccgcactccaacactgatggtgaagaatgcagttttttcttttctttttgtacacaaatgaggcaatacagttggcatcgatggctgctactcgctggtctctcctttagcacaggttaccatcgccgtccgccgcttcgatgctcggctgctgccccatggacgcattcaccacacccctacagccgactctcctgcccttcactctgtggctatccttcagggaaattaattatatgcattttctattctgttgcctgatgcccactactattgtttgcggggatagtacagcctagcctaggtgc

SEQ ID NO: 13742 - DNA, 415 bp, Glycine max
  Coding DNA Sequence Number=SeqID_3963
cttcgagcgatgcacagtcctcacacgatggcagttttaatgaacagtcacaaaatttggatttgaaattatctgaattgcacaaagtcagtcattctcgtgataaaaccctaaaggaggagcgtgaccaacggcgtcgtcaaatgaatgtattccaaaaagatgtagcaaacatgccacctgaagcgattgccgaactgtttggacccgatttcaagccaaatacacgaaacacccaaaatgcatcgtcgatgctgatggattggctgtggggacgaagtgataatgaaccacacaactgatgttccatatttaaatcattcaacttctgccaggtgcacgactacagtttgatttgtttctcttttaatctgaaacgattcggttttgatgtgggtgatctgttctttattag

SEQ ID NO: 13743 - DNA, 546 bp, Glycine max
  misc_feature (151)..(151): n is a, c, g, or t
  misc_feature (321)..(321): n is a, c, g, or t
  Coding DNA Sequence Number=SeqID_3964
atcgaccagagctcttacacgcgagcctactctcgcgcactcatcgtgctcgtcataatatgactgatagaccagcgctgtcgccgacagctatcgtaagagagaggatcataacgcggtgcggagcagtacgaacgaggaacgaaccgcnacaatagaggtagtagatgaataatatgaatagaccacacgtatcagcgcgacgcgatcgcgaccgcacatctcgactcacccgcacagacatgtgagtgagtgggtcgcacgagtgcgtggtgccatcgcgtgggtcgtgaggagatgaccgcaattccgtagcgagcnacgtctacatagatcagcgcagcatcgcgcagtataagacactcggctatgtgcctcgcgctgctgcagtattccaccatacatcatcatctatcgccactctattccgctcacgccacgcctcatgctccgcacgagtaacgcctcctcacttatatataagacatagaagttatccactacacgtcataaagtaacgcttctctcgtgcatgaattcgacgcc

SEQ ID NO: 13744 - DNA, 434 bp, Glycine max
  Coding DNA Sequence Number=SeqID_3965
tcacggcacgctgtatggcgacggagcagctccagattttcggcctttcagtaaatatgctggaagacaagggggcagtaagggggacagtagattataagattggggtaaagacaagaccgtcgctgcagtttgtcaccaagcacatcagcagcaccaccaccgatagtaagcaacctgttggatgcagggttccttggtcggagttcatcgctgatgacagcccttacttcattgatgacgaactccatctgcaagttcacgtgaagataacaccacagccggagtgatgcatgtactgcccgcaagctttatggtcctcgcttaagtccctctttgtttctgtgagcgagaggggaagcccctgctattctgaaacaggaagaaacctgaagcgggcactctagttatttgctagcatttgctctgctctc

SEQ ID NO: 13745 - DNA, 538 bp, Glycine max
  misc_feature (94)..(94): n is a, c, g, or t
  misc_feature (420)..(420): n is a, c, g, or t
  misc_feature (503)..(503): n is a, c, g, or t
  Coding DNA Sequence Number=SeqID_3966
tgccgcacaggtgacaacgtgactcggaggtatacgtcgcgagacacatgccactgtgatatgtatagcgacgactgagcaggtgtggatgcgnagttatactgaagatagttaggtgtcgcgctgtcgacactccgactctcgacgccgacagatggtgtcacatcgtcaagcagacacgagacagatacagaactggtactatagacggagagcagtagtagatgtcgagatagagataggtgatcacgtcgccaaccatcacgaataccacgatagacaagtcggtatgcgcatatcacaccgcgcacctctacagcacatcgcaactacacagtgtcttggcgcacgagagagatatgttactcaagatatatatgagatgaaggatatgtggatacagaggctgacgggcacacntctctctctacgaagcatcgacatgaaatactacactgacgatagtagatagagagggtgtgaggacacgagtgagacgtctngatgctatctgacgacagagtatcacgatcgttat

SEQ ID NO: 13746 - DNA, 400 bp, Glycine max
  Coding DNA Sequence Number=SeqID_3967
gaaacgaccattgagcaagcatactgataatcaaataattattatgcattttcagcatttggctttagactttcgagaatcacttgattataagacacttttgcaattacatcattcaaaagtttattcttataaaactgttcaatttgcatcttatttccaccacattccttgcaatagcttccctttggaacacatttctcacagtaatggtgtccacatggcatcactgtaactggattcttcataggattaatgcattcacaacatgataatgatatcaataacgacgtctgtgcatgatctatcttggctatggcctttgtaaattgcttctctttctcgtcaatctgtgccattttttctttgattttagcttcatccaattctgatagttttt

SEQ ID NO: 13747 - DNA, 453 bp, Glycine max
  Coding DNA Sequence Number=SeqID_3968
gaatgaggctaatgggctccgattcgggctgagatgaaatcagtgcgggggaaggaacaagttataacaacctcagttaaatatgcatatgtgcaaaagatatctttcaactactatagttcttcttagaaatactaatctccgagttttttaatggctaaaagacctaagaaaaccctggatcttcaatcggatcaatattcaaagtaaacgagtggacggacgcatcaaaacacaaattttttgtgatgccctacaatattacatgaaacagaactttaaattatccatggtagaccaaaaccagatatactttgggtggtggagaattatcccttttaaaactgggaaaagaaatatgaacagataaattcccccaggttttaaatgatttgaagaaaatttgaaaaaggaagtcttttattttccaacgggcatcaagggaactcaaat

SEQ ID NO: 13748 - DNA, 264 bp, Glycine max
  Coding DNA Sequence Number=SeqID_3969
tgaaacccaactaataacagaaaaggcatctgactgaaatgcgggaggatgaatctgaaggagctgacattctcttggtggggccgggtctttcttacttgcatatcttaacgctgctccgggataattctcctttgcctattgcggcctaccatgtttctggtggggctgctttgataaacgctgccggggctatcaccctggtggaccaccattttgttgtgatggagtcactcctcttcctcccatgggccggtgctgata

SEQ ID NO: 13749 - DNA, 422 bp, Glycine max
  misc_feature (188)..(188): n is a, c, g, or t
  misc_feature (246)..(246): n is a, c, g, or t
  misc_feature (267)..(267): n is a, c, g, or t
  misc_feature (287)..(287): n is a, c, g, or t
  misc_feature (321)..(321): n is a, c, g, or t
  misc_feature (325)..(325): n is a, c, g, or t
  misc_feature (328)..(328): n is a, c, g, or t
  misc_feature (344)..(344): n is a, c, g, or t
  misc_feature (363)..(363): n is a, c, g, or t
  misc_feature (368)..(368): n is a, c, g, or t
  misc_feature (389)..(389): n is a, c, g, or t
  misc_feature (397)..(397): n is a, c, g, or t
  Coding DNA Sequence Number=SeqID_3970
gcgagcggtcagaacttggtcgattcgactaagctcgcaagaatcgtaaatgattccaaaacgtctctccctaaagagaagaaggataagaaggagaggagaaaacacaggacagaaaagcgtgagaaatctcacagacattcttctaaaaagtccagcaagtccccaggcgtgtctgagaagagtgntgtgaccgaggagctcgagggacctcaaaaccacctcggttatctgtctgatggaagnctgaataggaacaagaggaanaagagatgtctctcctccgnctgctgagagtctcatcaaagttgtgcctgtagnaagnaancctctacgtattccgnttgacctttcaaaaaaccnaaggntgaaagcccctttgccccccngaggatgnttgttgctttgttccaccttccggt

SEQ ID NO: 13750 - DNA, 508 bp, Glycine max
  misc_feature (49)..(49): n is a, c, g, or t
  misc_feature (287)..(287): n is a, c, g, or t
  misc_feature (289)..(290): n is a, c, g, or t
  misc_feature (292)..(292): n is a, c, g, or t
  misc_feature (423)..(423): n is a, c, g, or t
  Coding DNA Sequence Number=SeqID_3971
gttcgagacggtggtgtacccctgcgtgcatgcgcgtgtgcactcgttnacgacgcccagggaagtgagctgtgtgcgctgctgtgtgagagcgtatgcatattgatcgtatgtattgggcgtggacgtggtatacggcgctcgcagagcgatactcgtcgagactacatcatctactccattgtactgctgatcgggtagatggactataccgcacatgttcgcgcgctgccatattggcgcgtggcgctatcacgatgcatctgcgtgcgggtagtatcgtgtgntnntntagcggcggtaagtctctgagtcttgagagcggctactattccagagctcagttacgcaccagtgtagcgtgcagcactggagccggccatggcgtagacatgctctatactatgaccgcatagaccgagnatgacagtcattccgccgctgacaggcgcgtggtgcgacggagctgtgctatagagctgtatgtgatgtgcctcagctgcaattt

SEQ ID NO: 13751 - DNA, 599 bp, Glycine max
  Coding DNA Sequence Number=SeqID_3972
ttaaccgaacttccaaacaatacatgaggaattatcgtgactatgctgctgaactatcttacggtgaagaaaaagtactaaaacgtcctgcttcagctcacagaggcaacgcccaacaaggcttcagtaataatgaagaaggttcgggttttggaaggtcatttggtaaaggacaaagagtaggaggaggagaaaagaaacttcatcttggtaaaggaaagaattacagagatgaagagcaggaagagctatcatcattatcaggattcacagcatcagataatgaggaaaacgatagagatgagatcaaatggagtctcgcaccaaagaacaagaagaatgtcaagtattcagaatcagatgaagaggaagaagagaatcaatgggaacatgaaaacagggatataatgttaaagccaaaagacgatttacatgaaaggtttagagagcatgatatgatgagaagacaaggtgaattagaaaagaaacaaagagaaattctcgctgctgctgaaaatttacacaacgttcagaatagtcaaactatgcctttgaagagaccacagacttcaaatggtgccatcaggtctagtactaat

SEQ ID NO: 13752 - DNA, 488 bp, Glycine max
  misc_feature (388)..(388): n is a, c, g, or t
  Coding DNA Sequence Number=SeqID_3973
aatctcgaaacaatgctgaagctttggaatcagaatgtgaatctaaagtttaattttaactcacttattgaggaatagaaaaaacttctgaaacatttcaataacgattccgtcaggttttgacttttcaactagatttataaaattatactttttataaaaagaaaatcgaaagcaatatctttcatctgatactatgatcgtattcttggagcaaatcaatacaggagcaaaaatttcatgaaaagaaaaatcagttttatgggaaaattgactttgaaaaaacagagcgtcaaatatcccatagacttagatgctaaacgcattaaactctaaatttctgttcaagaacttttttctaaaaatcgatcttcacactatctagatnactcaaacatacgatcatattatcactatgaagatactaaatcgaattttctcataaaaaataaattaaaaatcaaaacctgacttttgattccattttg

SEQ ID NO: 13753 - DNA, 456 bp, Glycine max
  misc_feature (150)..(150): n is a, c, g, or t
  misc_feature (163)..(163): n is a, c, g, or t
  misc_feature (166)..(166): n is a, c, g, or t
  misc_feature (278)..(278): n is a, c, g, or t
  misc_feature (280)..(280): n is a, c, g, or t
  misc_feature (290)..(290): n is a, c, g, or t
  misc_feature (338)..(338): n is a, c, g, or t
  Coding DNA Sequence Number=SeqID_3974
ataatagttggcgtctgtcggcgtctgctagtgtaaggtgtaacatacagaatagccactggcacacaatgcgacccacacaccatatgtatcatactaagctctctcctgtatatgcgcagagctgtagaggatagagagggcctgggncataataatagtngancataacagataccaggcctccgagtcgcgctcgcagtcattctatcacagatactgtcggctaggtagctgagtacaatagtcatgctaaattatatatttatcgtggtgtntngctgggttgnggagagtattgtggagagcagcattgtctagtgtggtcatatttgtanctatcatgcattagccaacatctaactttcagaaacgcatctatctagtcgtgactggacagcaatgcaggccgctcaagtggtaccactcacagctcacatatactgcactaagata

SEQ ID NO: 13754 - DNA, 381 bp, Glycine max
  Coding DNA Sequence Number=SeqID_3975
agtatctcaattaaccggcgcattcgacacccgatctatcatgctacatacgtgttcaactgggtgcaaacattcgcatcgcagtgatgaagtgggtgaatagctgatatttccacagtagcttctcatcatgcgagtcatagcatttcaaacattaaagccgctcttcgattctgagcctatcaagcaaggccatgaatggaatcatgggcgcacacccgaattccacaaaagtactaaatatgcttcctgcaccggacagaaaagtttgggtagccattcaagtaagagtttcgggtatccattcgagtgagatatctaagcttgcgggtttatacttcgaaggtctatcacacagaagtgaactatgtactctccgcc

SEQ ID NO: 13755 - DNA, 461 bp, Glycine max
  Coding DNA Sequence Number=SeqID_3976
atgtggtccaccaggatgccaggtccagctggagagaagggtgatagaggtccaccaggatgccaggcattaacggaagagaaggagcgaaaggcgatattggtccaccaggagcagaaggattacctggcgcaccaggttatccgggagaaaaaggattaccagggccacgaggaagagatggacgtgatggattatttggatcgaagggtgacaaaggtgaaccaggattaatttcgccaccaggaccaccaggtacacctggtattccaggaagagatggaccaaaaggcgatcgcggattcccaggattaaagggtgatgaaggattacaaggtattcgtggcgaaaccggattgcaaggattacaaggtccaagaggtccaacaggaccaccaggcatacaaaggtgaatttggattggttggagcaccgggtctcgatggacgacctggatcaag

SEQ ID NO: 13756 - DNA, 376 bp, Glycine max
  Coding DNA Sequence Number=SeqID_3977
ctcttgtctttctttatttcatcaacagaagaagaagaagaagatcgaacgaaagctccttccattattccattcagcgatttcatggtggcgagatgtatgccggcgatggtggtggtggctattgccgcccttgacttgacggaatcctccaattggtagcgggacatcaacagctccccgctctggcaggatcgcatcttccacctcctttccatcctttacagaatcgtcaacgtcgtcactctcgttcaattagttcgaatacaattgagagtgccagagtatggttggaccacgcagaagtttggtgtcttgtttttgtcttccgtcgagatgtgcagaagttgcagccaaagttctttgcattgttttg

SEQ ID NO: 13757 - DNA, 563 bp, Glycine max
  Coding DNA Sequence Number=SeqID_3978
gaacaaccagtacacggcagcaattccggcgcttctccttgaaatagccaccaccggcagactaaagctgtccaggcttcacgttgaaggattcagcgagaatatattcaactcaatatctcgactggagaaagagaaggcagcgaaagaggagtcgctggcccactgcaacccggaccacgacaaagcgaagatatcccacctggaatctgaactatcgaaaatagaagagaagatagcgaaggccagggtatctctcgatgatattcgaggtggcattaagcggccgtgcctgaatctcatagcatcatcaacgcctagggagcttgcgtcaatcattgatgagaagaatatcaagtctggcttgctgggtcgctcactggtactggattgcggcgaggaagccagggagagaaactttaatatctggggaatgaacccggcagatattggcaggcttgaactggctgagcttgagcgggaaatttgcctgatagctcagtcagctgatgaaacagcggccagtgatgagcagaaggaattcagcggcaggcatggcgtca

SEQ ID NO: 13758 - DNA, 339 bp, Glycine max
  Coding DNA Sequence Number=SeqID_3979
gaagaagcaacctatgacaaccaaaagcctaaatacattccccaacgctctttttggtctgaaaggtggacgaagtggtcgtgtaacttgcatggcctcgtacaaagtgaagctcataaccccagaaagagaagtggagtttgaatgcccagataatgttttcattattaacaaagctgaagaacaaagcattaaacttccctactcatacaagacttattcttacatttcatatattaaaaaaattataaaatagaacgtaaaccactcacataatagcttccttaataattaacaaatacaaaataaataaattctcacctatattactctacctat

SEQ ID NO: 13759 - DNA, 515 bp, Glycine max
  misc_feature (35)..(35): n is a, c, g, or t
  misc_feature (159)..(159): n is a, c, g, or t
  misc_feature (185)..(185): n is a, c, g, or t
  Coding DNA Sequence Number=SeqID_3980
gacgcaaagtacacgcgccgagttaataatggtgnttgtgaaccccagcgtttacacgaaactcgcgattcgcgcgcgccgcgtcgcatatacaatattgagcggcagacaatccaacacatgcccttttatcacttactcaccagcgatacaccgccntctatattattattatacatgcatancacaattggcgccggttttcttgcggtgacacgcccgcgcgatgattatatataattactaccgccaaatattttcttcgtactacacgcggccaacaatattatgccgcggcgatccgctacgccgatgtcagccatacattatatgatagtccgctgcgaactatggacaatgtgcgcgatatatgtgtggcgggccgctacctttatacatttaccgagtaacgtcgtatgttaaagagaataaccacgcgcgcgtcgcggcgcatattataccacactttatcaccaacacggcacacttgaacggcctatataacacgggattgg

SEQ ID NO: 13760 - DNA, 557 bp, Glycine max
  misc_feature (34)..(34): n is a, c, g, or t
  misc_feature (63)..(63): n is a, c, g, or t
  misc_feature (298)..(298): n is a, c, g, or t
  misc_feature (312)..(312): n is a, c, g, or t
  misc_feature (404)..(404): n is a, c, g, or t
  misc_feature (444)..(444): n is a, c, g, or t
  Coding DNA Sequence Number=SeqID_3981
gatcaacgtgtacagaatatgcctagatagtgtnctcagaatatgatgagtgagtagcgatantgtacagattatagatcatagataaccatgtataacatattgtcgagtatcagacacctgctcgtactctaccgctattatgcgtatatatgtttggatgtgtacagtactatgatatgatagatgatactgtgcagtagtctaagagtggaatggagtgagcgaatacagtgctaagcgactgaatagacaacgagcgacgtatagacgatgacgcgccggcaagacgacgctngatccgatgaacgnacaacaatcatgcaatgtgaaagctgaggatagtgatgctgtaattcatatgtgatatgatagaactaatactatatatgcgtactgtctgnacgatctgagagacggagaacatgagaatatcagtagcgnattgtgcgagagagtatacagcgatggcgtcgaagcactgagatagtgagttcgtagatacacgactaataactaaagatatgatctattttaatgccattgtgctatctata

SEQ ID NO: 13761 - DNA, 519 bp, Glycine max
  Coding DNA Sequence Number=SeqID_3982
ttgatgtctcatgtaccgaggccatgttgcgcctaaacatgttaatgcagttgtgggcattatccagtccaagcgcgctattcaatttgctgactggtgcccccctggtttcaagagtggaatcaattcccagcctccggcagatgttcctggcggagatcttgccaaggttcagaggtctgtgtgcatgatctccaattcctccaatgttgttgaggttttctctggcatagaccccaaatttgcacctcatgtatgccaagagggcttttgttcattggtatgttggtcaaggtatggaaaaggtagagttcttttaggctcgttaatatcttcctgccccggagaaatattatgaggaagtcggtgcagaggcaattcaataagaaggtcatgaaggatcacattattgattacaagtttgcactgctacgttacttgtgctgagttgaaatttttttcctcgtgctcagtgtatggaagttcttttcgtggaacatgccatgatccggaactttg

SEQ ID NO: 13762 - DNA, 578 bp, Glycine max
  misc_feature (63)..(63): n is a, c, g, or t
  misc_feature (144)..(144): n is a, c, g, or t
  misc_feature (172)..(172): n is a, c, g, or t
  misc_feature (354)..(354): n is a, c, g, or t
  misc_feature (375)..(378): n is a, c, g, or t
  Coding DNA Sequence Number=SeqID_3983
gtctccgtgatcatggtactaagcctctctatattttatagtgttccaattatatacgactancacacccccaccctcatagttacacgataacttgagtagaaagtggaggtgtatctggatgtaagaatatataatatatancattacactaaattaataactttgatgnattacctcgcccgccgtcaacgtgctatatagatcagcaatatgcggcgacgaccgtggatagttcactcacgtcgactgacaacgagtagcagctctctacttttctgtactacacagatcgctaatacacgatctgtgtgccgtggttgcgatcagtgtacccatcacgcgatgatgtgngctgacctgcggttgtgtggnnnntacttcctcccctcgagatgtatacacacacctgtacgacgagcatgtcttaactcaactccgacctagaacaccacttcactgtaacactactcgtgcgctgcgtcaactccatcacataatacgtaccggaacatcctaccatctgctacatgctgagtgctgagagcacgtcgcagcactgtctgagatctcgtgat

SEQ ID NO: 13763 - DNA, 585 bp, Glycine max
  misc_feature (41)..(41): n is a, c, g, or t
  misc_feature (206)..(206): n is a, c, g, or t
  misc_feature (243)..(243): n is a, c, g, or t
  misc_feature (277)..(277): n is a, c, g, or t
  misc_feature (299)..(299): n is a, c, g, or t
  misc_feature (387)..(387): n is a, c, g, or t
  misc_feature (441)..(441): n is a, c, g, or t
  misc_feature (461)..(461): n is a, c, g, or t
  misc_feature (469)..(469): n is a, c, g, or t
  misc_feature (482)..(482): n is a, c, g, or t
  misc_feature (527)..(527): n is a, c, g, or t
  Coding DNA Sequence Number=SeqID_3984
tagcgttacgcaacagcgtgcacgtatatatggtggcctgnttgtgcggatacattcgtcgtgcgtccacgacgcatgcacgtagactgttgacttctttgtgttgtggaggcatctgtggtcgacgcggtcgcacgctggtcgaaatacgatgagaattatgttgtactaagtgcgagttgcttgttgtgtgggtgttgctctantgtctgcactgcctcgacgaccacatatgagctgcancgaggtcgatgtgcgcacatcgtgttatcatccnatatattatatgcataattatnggcgtatcgtatcgcgacatcaccagtctgtaatatatctgaacatgagcgtatggcgcgatggagcgcctgcatgtcatgtttcatnttctctgatatctgactgaatacacgcagtactctgcggcacacctgccacgcnattattagtggtcttgtgtnataatgcntgatatatcgtgncatatagacacatagcgttgattggtcgtgttgtccgcattgttngctgcctattagactgatctactctcatacttctcctatctcatactgctctatacat

SEQ ID NO: 13764 - DNA, 328 bp, Glycine max
  Coding DNA Sequence Number=SeqID_3985
ttccccaagggagaggttcatgcgttggatttttgcactggagagctctaagacttggtatgtcttttccttttgcatcctactcccttttgataggcatgaggtaacttacttttcacgctaatttcgactgaacgcgcatctgcgtgctaagcctgacctgcgtgctgagcaagatttcacggtaagcatagaactgcctgttaagcgagagttgcgcactgagcctggattgcgtgttgagcgagttgtccaattcttccaacttttcttcaattctttttctttcacatttttcgtcaatttccctctaagacacttcatttct

SEQ ID NO: 13765 - DNA, 135 bp, Glycine max
  Coding DNA Sequence Number=SeqID_3986
agaaaaattttcctctgccagcaatgttaagatcccagatggacatatttggaagattattataattggtttcagaagtgctgtcctttttatattataagaaaacgcaaaagatttcagtgctgctatagacac

SEQ ID NO: 13766 - DNA, 571 bp, Glycine max
  misc_feature (83)..(83): n is a, c, g, or t
  misc_feature (90)..(90): n is a, c, g, or t
  misc_feature (116)..(116): n is a, c, g, or t
  misc_feature (154)..(154): n is a, c, g, or t
  misc_feature (204)..(204): n is a, c, g, or t
  misc_feature (217)..(217): n is a, c, g, or t
  misc_feature (253)..(253): n is a, c, g, or t
  misc_feature (297)..(297): n is a, c, g, or t
  misc_feature (302)..(302): n is a, c, g, or t
  misc_feature (393)..(393): n is a, c, g, or t
  misc_feature (400)..(400): n is a, c, g, or t
  misc_feature (463)..(463): n is a, c, g, or t
  misc_feature (475)..(475): n is a, c, g, or t
  misc_feature (503)..(503): n is a, c, g, or t
  misc_feature (506)..(506): n is a, c, g, or t
  misc_feature (521)..(521): n is a, c, g, or t
  misc_feature (545)..(545): n is a, c, g, or t
  Coding DNA Sequence Number=SeqID_3987
cctacattccatgcatcttcttatatatgatctgtccgtcgtcgacacggcgcgccgggcttgcatgtcatgagcgttcagtnaatcctntatcatgtatatcgtccacgcgtagnttctatgatacatctactatgcgagcacctgccgcgcngccgcgcttcagccgccgcgcgactatcatacactatgttatctctcgtncgctcattcttcntcggcgcgggagacgacataaacactctatacgtcngcgtccgctacagtcgtctcgtgttctcgtgtgtcgagtatcgntcttnttgtgtcgatgactagtagcgtgtgacgcctctactatatgattttgtcggtgataataatcacctatctcggtgttgtgtatatgatgtntatctgntttatgtcttttgctggaggtgaatcttgttcctatattcacatatctctcgttttgctggtngcttacgcctgngtgtgtattgttgtgtacactacgcgtntcncgatagctctctcgngctagtgtctatctgtctattatncactgctgcttctcggttttgctgct

SEQ ID NO: 13767 - DNA, 567 bp, Glycine max
  misc_feature (52)..(52): n is a, c, g, or t
  misc_feature (119)..(119): n is a, c, g, or t
  misc_feature (150)..(150): n is a, c, g, or t
  misc_feature (165)..(165): n is a, c, g, or t
  misc_feature (168)..(168): n is a, c, g, or t
  misc_feature (170)..(170): n is a, c, g, or t
  misc_feature (195)..(195): n is a, c, g, or t
  misc_feature (232)..(232): n is a, c, g, or t
  misc_feature (280)..(280): n is a, c, g, or t
  misc_feature (302)..(302): n is a, c, g, or t
  misc_feature (476)..(476): n is a, c, g, or t
  Coding DNA Sequence Number=SeqID_3988
aaaactcgcacgcaggagacgcgctcgattagcgctacacggcgtgcaggtntacacgaacagcaagtctgttatgctcgtgcttacagactcatgccctctgcgacatcattgacatntatctgatgcgcacgatgatgctgaatgcantgagatgcaccaccncancntcagtaaacacagcgcccgcgtctncacccacgaccatctacgtactattcatccacatccncatccctattttattatatgcatagcatacctatcattactacagacntcgtcacacacaccgcatcaanatgctggatctcaactgtatagtccacatacacaatgcattcaccatagacacagacatcgtaatgacattatatacatatctcgataacacatgaccatctcatatagtgtgtatgcacactcaacgacacgatctaactctaaccgtcaacaccacattcgcgacaacacantatgagcgtgatataatgacatagagcacaaccagctcacgacctactgcacacacacacatacgagcgcgtgcactagaatacgattcac

SEQ ID NO: 13768 - DNA, 310 bp, Glycine max
  Coding DNA Sequence Number=SeqID_3989
ccaaactggggcttggcaatttgccccccaaaaaaagggttgaaaaatttgcccaaaaaatctttttatgaaagacccatgcccaaataacggggggaggaagattggaaaaaacttcttatgcccgaaaaaaaaaccccctggagcgccaccaccttttgaattctgaaacccccccctcgtccccctcggaaaaccccccgtggggggggtccggaaaaaaggatggttatccgaggggggccccttccctggggaaattgaccacatgggacaaatggttatgcccacggaaatggccggctttggt

SEQ ID NO: 13769 - DNA, 575 bp, Glycine max
  misc_feature (26)..(26): n is a, c, g, or t
  misc_feature (93)..(93): n is a, c, g, or t
  misc_feature (122)..(122): n is a, c, g, or t
  misc_feature (314)..(314): n is a, c, g, or t
  misc_feature (485)..(485): n is a, c, g, or t
  Coding DNA Sequence Number=SeqID_3990
tccatcaggatgtgtaagtgtgctancagatatatatacgatagggagagtcgaatgcgcgatctgcgtgtctgtacatacacgagatcgtgntacactgaacatctactctgcatccgcangtattggcgttattcagtaggtgtatcatgaatgatgtagccaccagcaagcgcacgcgcgaaccagtacgctagagagtcggatcaggcgatgctcgtgtgtgtcgaacacaccgtttaggtctgaccacgagcatagcagtggtaatataggaacgtcagaagaattgtgcgggcagatatggtgtaacnaacatcacgttctgccacaatagtggagacacgtgtgagacgtagtggcggggcgctccgtcacatctctacactacaccacacctcgctgcctccacttcacatcacgcacagacagatccccggcatcgcatctccacgcctgcgacggcacggtatatatagagctancgacgcaccgtgttgaacatatctgccgtgacctgccctcagggggcggctgtggggcggagggggtgatagtacggcaccactgctact

SEQ ID NO: 13770 - DNA, 579 bp, Glycine max
  misc_feature (73)..(73): n is a, c, g, or t
  misc_feature (163)..(163): n is a, c, g, or t
  misc_feature (221)..(221): n is a, c, g, or t
  misc_feature (327)..(327): n is a, c, g, or t
  misc_feature (381)..(381): n is a, c, g, or t
  misc_feature (544)..(544): n is a, c, g, or t
  Coding DNA Sequence Number=SeqID_3991
gcatgcagtgcgacggcacgtctcgcctgcctctgacatgctcgccgcgcgtgctgtgtgtgcgctctctgtntctgctcctgctcccgagcggctgctgtgcttgcctgcgcgcttactactgcagagtccaggcatcgctgtcgcgctgctcccgcgacantccatcacgtggctatcgcgagcactgcttatagctgtgcctcgacgagcctccacangcgtgccagatcctgcgtccggctgctggcgcgctgcggtgcgccggacgcgcgcatgcccgctctcgcccggcgacagcactctctgtgtctctcctcgtgtcantcgtccgcagcggctgcgcgctgctcggcgtgcgagcatgacggtatgggcaanagactacatatatcaacgctctgcgatacacgactcagaggcgactctgtcgacgcgtgacgcgtgtagagtgcagggcgcacagcacccgcgacgagtgacgattgctgctgcctgtcctagtcgcgatatcctgctgctgacacgtgctcgtagagtcgantaagagtcacgtagatacagacctaccgcacacta

SEQ ID NO: 13771 - DNA, 541 bp, Glycine max
  misc_feature (102)..(103): n is a, c, g, or t
  misc_feature (156)..(156): n is a, c, g, or t
  misc_feature (159)..(159): n is a, c, g, or t
  misc_feature (228)..(228): n is a, c, g, or t
  misc_feature (361)..(361): n is a, c, g, or t
  misc_feature (363)..(363): n is a, c, g, or t
  misc_feature (378)..(378): n is a, c, g, or t
  misc_feature (468)..(468): n is a, c, g, or t
  Coding DNA Sequence Number=SeqID_3992
atctactctcatacgtaccaactatgactaccaacacgacaggcatacggaagcgctcgtgctcggtctgtcagaagatcgcacgagacgagagtagaccannccctgactgctctcgcattgtgtacgcgcagcgagtacgacctcacgtcaccncantacctccacgacagacagcgactatactaagattgcagtacgactacggcgcatcagagagcattcacnactcagcacgcgcgagagatcatgtgcgcgacctgcgtccgcgccgacacgcgacgtcgcgctgcgcgcgcgatgctcgcccaccatctctgctgacagaggagtcgatgaatgctactgcgctaccacagangnatcgtgagtgcacgncgcggagtcactcgcgcagcgcgcgacagcaacgacgaagtgtgtagcgatgtgatgcgtcccgctcgcacgcatgctgactgcatccgnatctctatatatgcgtcgtcaccgcgcgacgcgcacaccacacacacatcggcgcgacgacgcaaagcacatg

SEQ ID NO: 13772 - DNA, 536 bp, Glycine max
  misc_feature (26)..(26): n is a, c, g, or t
  misc_feature (47)..(47): n is a, c, g, or t
  misc_feature (126)..(126): n is a, c, g, or t
  misc_feature (135)..(135): n is a, c, g, or t
  misc_feature (162)..(162): n is a, c, g, or t
  misc_feature (171)..(171): n is a, c, g, or t
  misc_feature (271)..(271): n is a, c, g, or t
  misc_feature (279)..(279): n is a, c, g, or t
  misc_feature (287)..(287): n is a, c, g, or t
  misc_feature (291)..(291): n is a, c, g, or t
  misc_feature (296)..(296): n is a, c, g, or t
  misc_feature (323)..(323): n is a, c, g, or t
  misc_feature (374)..(374): n is a, c, g, or t
  misc_feature (393)..(393): n is a, c, g, or t
  misc_feature (413)..(413): n is a, c, g, or t
  misc_feature (483)..(483): n is a, c, g, or t
  Coding DNA Sequence Number=SeqID_3993
taatacgtgatactgaagccgatatnaccactaatctattgtctagncactagtttgtgatgatttgagatgacacacggactactcgtagatcgcagttcgacaacgatatcgagcgtgatgctngctctcttngacgtccatcgcactcagctagcgtantgtactccnactcatctgtcgctacgtattgacgatcgagcacgtagcacgcatgcagcgcatagagtactcgctagagctctcattgtgtgtgcgtatgagagttgcncgcgtagnacggaganctgnggagntgtatgatatcgctacgcgagatacangagatccacatcgcatacgtagtcgatagtggtgagtcatgggtgcgtatnatcaaccgagtagatcttncagactagcatgctcagtgntcccgctgtcgatgcgaacgcgtgtgtctcaatcgactgttgtacattgtaggcgtagcggacgagacgnatttgtacgcggctaccatatactgatctagtgtcagcgactactgcagcgac

SEQ ID NO: 13773 - DNA, 342 bp, Glycine max
  Coding DNA Sequence Number=SeqID_3994
aacgggtgcctcttggccggcttcagcaaacgcccaccggggtttcttacaatcgccgcctcctacgttaaattcgtggagtccgggggtgctagagttattccccttatctacaatgaggtccctgagaaccttaacaagaagctcgatttggtcaatggagtgcctcttactggtgggggggcctgacctggtccatatctggcaactcatgggaacatgctttaggagagcgttaagaaaactgatggtgggagacaatgggcgagaagttgcgtgcagctaggtggaagccgcgggagcgaggaggggaggcggagggagcggatagtggtgaaccat

SEQ ID NO: 13774 - DNA, 539 bp, Glycine max
  misc_feature (226)..(226): n is a, c, g, or t
  misc_feature (286)..(286): n is a, c, g, or t
  misc_feature (504)..(504): n is a, c, g, or t
  Coding DNA Sequence Number=SeqID_3995
ccttcttttccactatttgtacttgtgtatggtggtatattctcccatctctcgcgctgcttatttatctccactgaattgtcattccgcctgatatgtcgggcgccgtcagtctcgcgcttattgttatggcgcctcgctcgattctttctccgccctcatatttctatataaataaataaacgcgggcggtgtatatatatctcggcgccgactgtcgcgatanaacgttatctgtttatatattgcgcgtatacgcgctccgcgggtgcgatatattatacancaacaataatatgttgtataaaaaaattcactctcggtctcgtcttcgggtccgcctcacataataatatataggctcgcgtatgtgttggtcggcgtaatggcgtaaacaccactcctttacgtccgcctgctgcgcggttatatcgctcactgcgcgttgatatgttcgcactgtgatatttcttcattcgtggccggcgcgcccaacgaatatgnatactgctctatgtatggcatggtgcgctcgagta

SEQ ID NO: 13775 - DNA, 584 bp, Glycine max
  misc_feature (271)..(271): n is a, c, g, or t
  misc_feature (367)..(367): n is a, c, g, or t
  misc_feature (462)..(462): n is a, c, g, or t
  misc_feature (514)..(514): n is a, c, g, or t
  Coding DNA Sequence Number=SeqID_3996
aactgctattcacacaatccatcttctctcgactaatcgcagtgactatgcgacacactgcgtcgcaacactaaccatcacgccgtatacaccgcttactgaccaccctcccacaccaccacaccgcggcgcgactgctcgcgtgcacccacgctcgtcggtgctcacatagcactctactctccgagtggtccccaccaccatgctctctatgtggtatgtactacagcaacatcagtctcgtacttctctgcttctctactatatctcnctccactctcgatactgtgtgtattgttctgctacatcctcatataccttcactcacaactcaagacggaactacacatagagcgagatgagaggntagagtacacataatcgactagcagcactcgcgagtcgcggctggtgccaccgcacctccgagtgccgaacggacgacacaccgaaacactatcnatatactgtcgtgtcgctgatcatcggtgagccgtgccaactactgaagccntctcgttgcagaccacaaactcgatactgctcgctctattgtgtaggtgttgagccgctattactacaca

SEQ ID NO: 13776 - DNA, 588 bp, Glycine max
  misc_feature (44)..(44): n is a, c, g, or t
  misc_feature (49)..(49): n is a, c, g, or t
  misc_feature (56)..(56): n is a, c, g, or t
  misc_feature (91)..(91): n is a, c, g, or t
  misc_feature (140)..(140): n is a, c, g, or t
  misc_feature (145)..(145): n is a, c, g, or t
  misc_feature (147)..(147): n is a, c, g, or t
  misc_feature (230)..(230): n is a, c, g, or t
  misc_feature (237)..(237): n is a, c, g, or t
  misc_feature (242)..(242): n is a, c, g, or t
  misc_feature (260)..(260): n is a, c, g, or t
  misc_feature (307)..(307): n is a, c, g, or t
  misc_feature (309)..(309): n is a, c, g, or t
  misc_feature (334)..(334): n is a, c, g, or t
  misc_feature (370)..(370): n is a, c, g, or t
  misc_feature (405)..(405): n is a, c, g, or t
  misc_feature (505)..(505): n is a, c, g, or t
  misc_feature (526)..(526): n is a, c, g, or t
  misc_feature (535)..(535): n is a, c, g, or t
  misc_feature (553)..(553): n is a, c, g, or t
  Coding DNA Sequence Number=SeqID_3997
agcgctctataggacgaggtcgactgcacagcgtacgctaatcntatantgaatantatctcacactacatataccacgacacgacacgcngagtgatcactgagtgtcgagcatgcgatgagcaggactattatgatantaagntntatgagtgatctgtgtacgtcgtgtgcgccatctagacagcctgtcgcgtacgtctcatatgcaacgcgatcgacgtattagngatacantagcnagatcgactcatgcaggnaggcctggtctgagaccgaccgagcagagctaccctacgcagtctcnancgacgatcgacagtcgtgtcatatnctaatatatgctgagcgtgcgtgtgagtgcgtatcntctcacagcgtcgctgcgtgatctgatgtcgacgngcgtcgactgtatgcgtagagcgtcgtgagtgcgctgtgagcgagacgtcgcgtttactgtgcggcatgtgcgttcagtctggattagtacggctcgctnctgtcatagtaggtagtcctnatcgcgcgngggagtgtactgcatggntatagagtactacgatgcgatcgttctgcgcgtca

SEQ ID NO: 13777 - DNA, 581 bp, Glycine max
  misc_feature (206)..(206): n is a, c, g, or t
  misc_feature (272)..(272): n is a, c, g, or t
  misc_feature (289)..(289): n is a, c, g, or t
  misc_feature (355)..(355): n is a, c, g, or t
  misc_feature (508)..(508): n is a, c, g, or t
  misc_feature (529)..(529): n is a, c, g, or t
  Coding DNA Sequence Number=SeqID_3998
aacactccgcggtaacactgcgagattgagagatacgagacaagagctctagacgatagtatagcacgtgagagggcgcgctcgggagtgaggagagagccgcactcgcatcgaaccgttgcttgcttccgtccgatgtacgtgaacgtcggatgtagtatcgttaatccttcgcactcgtgcttcgacgacgacgagcgcgtcgntcatatagcatattcctcactgttggttcatatatctcgcgcttcggatcgttagtcgcgtcttgnatcaatactcgcccgcngcacactctcgattcataccgagaggtggttgacagcgagcgagacgttcttctatgagggctgantgagaatcattactcgacgagcagccggggcaggcagtcaacgtgagacgcaatatcactcgacagcatcaccgcacagaacaagaggcgaggaggatagagagtacgttcgaacacctcaataatagacgactcacctcatcagcaagtagnagcacacagcaagacgcaacnccgagcgtcagcctcgcgtctcgctgctcagcctagtagctcttcgtctcat

SEQ ID NO: 13778 - DNA, 582 bp, Glycine max
  Coding DNA Sequence Number=SeqID_3999
gacatgagcctactgatttgaattttgaacaacttggatgaaagatgccctatgctgtattggcaagacatatgaatctcagaccaccagactgagtcacagatggtcatatcatagagagacagacacatgcagacctcccatatcttttctaatccctccctcatattttctaacccctctcccagattctctaacccctgttcctacctccccatagacccctgcagcctggcaagccatgagtgtgacatgtgtggtggtcatgttcataacatgtaccacatgctgagtgcataacaagtgttttaaaatatcattacaaaagttgtccctaaaatgggcactttcccatacaaatctctttgggtgagtcaaaatgagcctgagcccatgtaaaaatgttttataaaaatgtcatataaaattgatttttatggattaatgatatttgggtcgcgtcggacctcagcctagcaacctcatgaaagaagagcattagtagtatagtctactaatgtgatgacactttctgactaaagatgtttgatcaccttatggctgaacacatctttatgtcta

SEQ ID NO: 13779 - DNA, 435 bp, Glycine max
  Coding DNA Sequence Number=SeqID_4000
aatatcgctttgatcgtcgtcacacagatcctccattttcgagaatagacgcaagtgtacgtaatagttttcgtcagatcttggacgttatcagttcaaagagaggagaagaaaggtcaaaggcaaaagggggttgaaggaaggatgtcttctttcacaggaactcaacagaagtgcaaggcttgcgagaagacggtctaccctgtggagcttctctcagctgatggtgttacctatcacaagtcttgcttcaaatgcacccactgcaaatccaggcttcagctgagtagatattcatcgatggaaggagtgttgtactgtaagcctcactatgagcagctcttcaaggagtctggtagcttcaccaagaactttcagtcacctgcaaaaccagctgagaaatcaagtcctgagctgacaaggactcctagccga

SEQ ID NO: 13780 - DNA, 559 bp, Glycine max
  misc_feature (26)..(26): n is a, c, g, or t
  misc_feature (127)..(127): n is a, c, g, or t
  misc_feature (323)..(323): n is a, c, g, or t
  misc_feature (325)..(325): n is a, c, g, or t
  misc_feature (347)..(347): n is a, c, g, or t
  misc_feature (512)..(512): n is a, c, g, or t
  Coding DNA Sequence Number=SeqID_4001
tgtctgttcggtagtgtgtactgtcntgctagtgtactagtaggcgtagaagctagaggtatatcgtataagtacgtagtgttcacgctctgcacgatcgagcgcagaggagtatgcgtcgtcacantgctgagtgctatctgcgtcgcgtctccatgtatagattgagctgtgagggtgctgagcgtgatgttctcctatcagttgatgttatgagcctaagactgatggtgccgtgctgttcctcttcgtcgacctgcggtgaggagtgatgatgtgtgctctcgtagtgcacgtctacgatgactgagctatagttactngngctagtcagaggcatcgacacnacatgtcgagtccgatgcagcgctacgtcacggcctactcgcacgagcaggagagcgtgtgtgtgtgagagtgtgtgagactctcatgcgatgcgtactcgcgactctcagtacgagtagggcgtgagacaacctgacacggcgccacgcaatctggacgtgcanacgcgtcggcggctgcaggagtagttgtatgcggtcgtcgagacgtc

SEQ ID NO: 13781 - DNA, 162 bp, Glycine max
  Coding DNA Sequence Number=SeqID_4002
tctttgttgcagttactgtccgggccaacatttcttggggccatgtcaaccttgctgtgacttcggaatggctgtgggggccacataccattcctactggctgttctaaggattgcccagttcttggttcatcggggatgtgtcttcttaacttgtgcgagg

SEQ ID NO: 13782 - DNA, 363 bp, Glycine max
  Coding DNA Sequence Number=SeqID_4003
gcttccgggctttacaggtgtgtaaaaagtggcgcacaaaatgtgatgttggtgaagcgtgtcaaacccgaagagcaggaggcgccacgtacttggctgacttattgaaatacaaatacaaagggacattcggaggaatttgtctgctgtgaacgagacagtgatggcacccgaagacacagagtgtatatcgaaactgttcaaacccatatacctgaaggaggtggctgtgctgactcagaatgtccccaaccccacaacgccagccaacccactccctctcaccccctcccctgacaccccgccactccaccaacaaacgggataacatcttacttaaaccgttctgggactccgccagat

SEQ ID NO: 13783 - DNA, 455 bp, Glycine max
  misc_feature (44)..(44): n is a, c, g, or t
  misc_feature (65)..(65): n is a, c, g, or t
  misc_feature (96)..(96): n is a, c, g, or t
  misc_feature (99)..(99): n is a, c, g, or t
  misc_feature (206)..(206): n is a, c, g, or t
  misc_feature (240)..(240): n is a, c, g, or t
  misc_feature (242)..(242): n is a, c, g, or t
  misc_feature (302)..(302): n is a, c, g, or t
  misc_feature (412)..(412): n is a, c, g, or t
  misc_feature (418)..(418): n is a, c, g, or t
  Coding DNA Sequence Number=SeqID_4004
gagtgcgattggctgtatgtcatactgtgctctctgcacctctngtctacggtctacttatgttnatctacccctactcgcgcttgcgcttataantantagctagcatctgctagacgcagacactcgtctagcaggcgtgagcgtctctctggtgctgcattttatactacgtatgacatgatacttattaactctagcacacnaatgactcgactcgccatgcatgtgcgaggcgangncggcgagcgggcatccttctctttagcatgactcagaggtgatagcgtactatcgtgagngagttacttgtgctacctcttacctcatcccagacaacgacacgcaccacagcgacgccagcgcagggggagcgatatcaactacacatatataatactatataaacgangtgacncatctgtctttttcctcaatgcgtgtagtgaacagcc

SEQ ID NO: 13784 - DNA, 505 bp, Glycine max
  misc_feature (265)..(265): n is a, c, g, or t
  misc_feature (278)..(278): n is a, c, g, or t
  misc_feature (321)..(321): n is a, c, g, or t
  misc_feature (325)..(325): n is a, c, g, or t
  misc_feature (328)..(328): n is a, c, g, or t
  misc_feature (371)..(371): n is a, c, g, or t
  misc_feature (440)..(440): n is a, c, g, or t
  Coding DNA Sequence Number=SeqID_4005
tctcgcccgacacgaatgtgcgtggcgaggagaatacactgtatagccgacattcagtcagaccgacaagatgcggaggcgtatgcacagcgagagatgcagctcatcatacgaaatagcatcgaaaggtactacgatgtcgcactcgagcaaggggggcagagcgtcgataacagggcgcagatggcggcgaatagacaacatctgtaagtatatatatgtgcggcgcgaatgtaccgcgaatcataaatattcaccagcgacngagcgtgcccctnttggtgtgtcggggcggtcgagtgagtttatggtgcagtgttnctanatntgcgtctttgtaggagttgttatttacttagcgtcgagaagtnagagaggaatagagaggtctgcgacgggtgtggagtgtaagtcgtgacgaaggaggcggaacggagatngaggagagaacagcgagcaagaaattatatgcgcgtaatagactggaatcccgacagagaaattg

SEQ ID NO: 13785 - DNA, 234 bp, Glycine max
  Coding DNA Sequence Number=SeqID_4006
ggtgatgccaatcatccccactgagaagcttgatgattttctgaacgagcttttggccaagcgtgatgcctggtttcaagatgtcaaggatcaacctttctgtatatcttcaaatgtaggtgcatagaattgcctttgttctttgcacaagtacttttggcctcccatttagagtctcctccggtattgggttattaaagtgttattaaagtctcatatttattgttttcgctg

SEQ ID NO: 13786 - DNA, 563 bp, Glycine max
  misc_feature (35)..(35): n is a, c, g, or t
  misc_feature (98)..(98): n is a, c, g, or t
  misc_feature (231)..(231): n is a, c, g, or t
  misc_feature (251)..(251): n is a, c, g, or t
  misc_feature (260)..(260): n is a, c, g, or t
  misc_feature (322)..(322): n is a, c, g, or t
  misc_feature (329)..(329): n is a, c, g, or t
  misc_feature (337)..(337): n is a, c, g, or t
  misc_feature (390)..(390): n is a, c, g, or t
  misc_feature (394)..(394): n is a, c, g, or t
  misc_feature (398)..(398): n is a, c, g, or t
  misc_feature (428)..(428): n is a, c, g, or t
  misc_feature (471)..(471): n is a, c, g, or t
  misc_feature (475)..(475): n is a, c, g, or t
  misc_feature (516)..(516): n is a, c, g, or t
  misc_feature (519)..(519): n is a, c, g, or t
  misc_feature (521)..(521): n is a, c, g, or t
  misc_feature (532)..(532): n is a, c, g, or t
  Coding DNA Sequence Number=SeqID_4007
tgcattcgtgctgatcttccgtcgtcctatctacncgttattatctagtctctcgatatatgcacacacagactccatctatatacgaatccgcaccngtccacctacgatcatacggacatacgctctagatcaactatccacaacacacctcacgcctcctttcacacctcgttgtctctcacattgtgtcacgtacatcaattagaccacataaagcactacacaganttactcatatccacgtcggnacgacgcgncgtgcactcacttcatagaggtattgagagatactagctactatatacctctcgaaagtcangacgacnacgcgccnatcactctcgtcttctcatccctattcaacgcaacgccgcatatacgtagaantgantacntcgataagtatgatgtcataatcgatctantatgcctgcatgcctcccttcggtgctcgacatatgtgtgtgntacntttcaccctccctaaacctcgtatgagacgatacacttagncgnantgcgccacggncagagacgagatagttgagttatgaccacgc

SEQ ID NO: 13787 - DNA, 261 bp, Glycine max
  Coding DNA Sequence Number=SeqID_4008
atgagggaattatagctcccatcgccataggtttcattgtctgcgctaacattttgttgggtggagccttctgtggagcggccatgaacccatctgtgacatttgggcctgctggcaggagctggacctgaaccagacactggatctactgggccgggcctgatataggtggcggaatcgctggccttgattacgaggctgactttatgagctcacacgcacgagcaggaaaccaccactgactactacatggagggaaat

SEQ ID NO: 13788 - DNA, 380 bp, Glycine max
  Coding DNA Sequence Number=SeqID_4009
attggcttgccattgttctttcagttacttccaatgcccaaagaaaaatagctttactgctttaatttggtatattactactagctaaacttgttttttccaagaactagcaaatggcagtaaaccctcaatgtggggtctagcttgctaaaaatcatgtgtttattatggtagtgttttgattctgcaaaggaagaaaaatatttggtagcaccaaaaaggctgtccatgtagaaaaaaaatcaaaaactggaaatcagattctgacatgtgtgtaacattttcccgaaccataatccttagtgaccaactgtgtttatgtccctgtaacactgatcgttgggcttgatcaaaggcaatggcatggtacaaggtgtcta

SEQ ID NO: 13789 - DNA, 597 bp, Glycine max
  misc_feature (57)..(57): n is a, c, g, or t
  Coding DNA Sequence Number=SeqID_4010
gtctcgtttcgtacatcgactctgtttgtttaccgcatccgcactctgggggcgctnctaggatgtgtgtatagtgttgtgatcatgaacaaacagcggcgcgcgcgaaataatacgcaaacagtagaacgagatggtaacacgacgccgtcgcacgcgttgtgtccgtcttcatttacaccgctcccgtattgctcggcccgccgagttttatggatatataatatatcgccgcgggccgacagatataataaaggcgtgcgcccggtgcgataaggagtagtgtataaacatggtcgcgactgcctggccggccgataataatcatacaacaatagatgggtgatacacaaactgacagtcagggcgagttgtgaactctcatgatataatagacgtaccgtggtcgcgcagtaataggggataacactcgacaagagagcggtcggcgggcgcggatcgcgcgacgtataaattactatagagacataatgatgtcggcgcgcgccgcgccaacgcatatatagcgaaatgtaggtagtgacgagccgcggcgatacccgatgtgattgtgacgtctggatcttgctgtcgcca

SEQ ID NO: 13790 - DNA, 185 bp, Glycine max
  Coding DNA Sequence Number=SeqID_4011
tataagcaactacaagaaggtattgttagagcacttgtgttttcggaattatgttttttagcggctatttggtattggatttattggaatttagaaattttttgtgatgaagatatggaaatccttctttggatttgtccaaaaaaaatttaaattcatttattttttgtacgtaggagtggctt

SEQ ID NO: 13791 - DNA, 516 bp, Glycine max
  misc_feature (91)..(91): n is a, c, g, or t
  misc_feature (109)..(109): n is a, c, g, or t
  misc_feature (204)..(204): n is a, c, g, or t
  misc_feature (207)..(207): n is a, c, g, or t
  misc_feature (309)..(309): n is a, c, g, or t
  misc_feature (435)..(435): n is a, c, g, or t
  misc_feature (479)..(479): n is a, c, g, or t
  Coding DNA Sequence Number=SeqID_4012
gtctttctcgttagtctgatgtctgatcatcactagtatcctatccttgtgtgctctgaacgctgacgcgatcaccctccgacgcaggcanacgtgtacaaacattgcntagcacaccgagatgacaagatcacgcataggaagcacccgtgcgctcacgtcctacacagttcgcgtcacataccactggatcgatcgacagtngcncgtggcggatgtcacgtctctgtgtggcgctccggctacgtcatgcatcatctctcgtatactagccactctcttctcctagtggttatcggaatacatacntgggattacaacgcgtgctctacatgccaccccagtcgcgccgaagcacgacatacctcatcctctcgctactcggatcgaccgacaaacgcacatcatacaacacaactgagatacatagacaanacatgatatgcttcagacaaactacctacccagcccacacacgntcgcacagaacggtaatacgacgactgaaccatgaat

SEQ ID NO: 13792 - DNA, 591 bp, Glycine max
  misc_feature (33)..(33): n is a, c, g, or t
  misc_feature (73)..(73): n is a, c, g, or t
  misc_feature (100)..(100): n is a, c, g, or t
  misc_feature (124)..(124): n is a, c, g, or t
  misc_feature (235)..(235): n is a, c, g, or t
  misc_feature (245)..(245): n is a, c, g, or t
  misc_feature (307)..(307): n is a, c, g, or t
  misc_feature (310)..(310): n is a, c, g, or t
  misc_feature (313)..(313): n is a, c, g, or t
  misc_feature (332)..(332): n is a, c, g, or t
  misc_feature (361)..(361): n is a, c, g, or t
  misc_feature (390)..(390): n is a, c, g, or t
  misc_feature (404)..(404): n is a, c, g, or t
  misc_feature (434)..(434): n is a, c, g, or t
  misc_feature (436)..(436): n is a, c, g, or t
  misc_feature (505)..(505): n is a, c, g, or t
  misc_feature (519)..(519): n is a, c, g, or t
  misc_feature (521)..(521): n is a, c, g, or t
  misc_feature (545)..(545): n is a, c, g, or t
  misc_feature (554)..(554): n is a, c, g, or t
  misc_feature (561)..(561): n is a, c, g, or t
  misc_feature (563)..(563): n is a, c, g, or t
  Coding DNA Sequence Number=SeqID_4013
gacgacacgaatgcacgtagagaagacagatcngtgatcatggtcgctcgtcatatcactcctggacagccanccaccactaccatcacctctctgcgancccatgatatgtagctcgtaagangtgtcgttgccgatctctcacgtgcgtgactcgcgtctgcgtcgttgtatctgagatatattgtctatagctatatcggtacctgcgacgacgacgtcgcgcacgcgcctnctgctactgngatgcatgtgctacattgcgtcctgtcgtagcaccttcgtacactcgtgtaggtgctatatnttnagnatgactatatcactatgcntgcctgtctcatcgctacgcgtatgacanttctacatctatctatcgctctttacttncatctctgccaagnggtctcgcatgactcgtgagactgggacgntnagcagactagttagtattgacgaatacgcacacgtcacgcacgatctgatgatatggcattcgagaggngccagcctgatgangncatagagtcagtgtgacgtacaanacgtgtaanaatatgncncacatgccaatccatccgcagggtcgac

SEQ ID NO: 13793 - DNA, 115 bp, Glycine max
  Coding DNA Sequence Number=SeqID_4014
gtctggatattggaaatttttcattgctgacagtcccaacaatgtccctacttatttttatgaaagtgagttccaggattcagggtggaaaactttgccagttccttcgaattgg

SEQ ID NO: 13794 - DNA, 505 bp, Glycine max
  misc_feature (115)..(115): n is a, c, g, or t
  misc_feature (120)..(120): n is a, c, g, or t
  misc_feature (167)..(167): n is a, c, g, or t
  misc_feature (237)..(237): n is a, c, g, or t
  misc_feature (242)..(242): n is a, c, g, or t
  misc_feature (320)..(320): n is a, c, g, or t
  misc_feature (396)..(396): n is a, c, g, or t
  misc_feature (462)..(462): n is a, c, g, or t
  Coding DNA Sequence Number=SeqID_4015
gtggtctttgctgccgctagtgtgtgttgtacccgcgcccccttggtgtgtgctgggtgtgtatacaccataggaagagatagataccaccaagctcagccggctgtggacgcgnggcgnggcgcgcgaagtaagggcaggagggggaagccgcgcgccggagcggnatacagaagagaagacgcgcgtgtatcaagatcacaccccccgcaacgcatgctcagtccgacgccagcncatcncgacatcacagaaaacgaaccgataagaccagccgcggcggctgtcgcgccgagcgtctgacgctagagggccgcggngtgtcgcgcggccgtggaggggacggtgtgtgacaagagaagactacagatgagatcagtgccgaggcactggagnaacacggcacaacattctaacccactgtcctcctcttggtttcccctcctcttatataatacacancccttctaagtatgtcatgtttgttagtccgtcgtattgttcg

SEQ ID NO: 13795 - DNA, 354 bp, Glycine max
  Coding DNA Sequence Number=SeqID_4016
tcctcaatggtcctctctgtcgagggggagaagcagccgagccccctgtcgccgcccgccgtcgctcaccgcggtgaccgcctcccccgtgctcctccgattggttcaacacctccgccgtcttccgctgctacctctacgtcgacgcgcgcgagccgggaggcaccacagcaccggatcgagccgtcttcttcctcggatccccgccgtcggtcgccgtcgattcattcgcctccagcaaccccggcctccccgagatgctctccctctccgctaccccgagaccgctgttgatgcccctgtgatcgactacgtcgacgacgacccttctttccgtttcagcgaagcttccag

SEQ ID NO: 13796 - DNA, 126 bp, Glycine max
  Coding DNA Sequence Number=SeqID_4017
agaacgggttgcactaatcactggtgaatttccacattctggatgacgggcaacggggccctgaatgttgatggcgaatctagcaagctgaaggaactagatctatccttatctgatgccattact

SEQ ID NO: 13797 - DNA, 583 bp, Glycine max
  Coding DNA Sequence Number=SeqID_4018
agtggaagcggaggaacccatgcaagtgctggaggcggcggaagcgggggtggttggtcagggtataatggtactgggtatggcgctgggtccggcagcggctcaagctctgggccagatgagccaaggatcatcaaattatggtggtgatggtgggagtacaagcgcaggtggttccggtggcggcggcggtggtggagaggccgccgacgacgacgacgactgcccggctgactccgctggctttgggacaggtggcggcaccggatctggatccagcgaggcgaataatgacggtgatgcctcctatacaaatgcaaatgcttccggtaatggtggcggcgagggcggtggtaaaaatggtggaaccggcggtggcacaggcggtggaagcggttacggtgacgcaaacccatgaagcctctccgtccaatcaaagcagaccgagagcccaagctatcgtcgttctcttttcttttatttgcatttgttttgttcttacgtttccatgtactattagggacaactaataaagggcttcattacacaagtgtctgtgagtgacgcggagactagctatttc

SEQ ID NO: 13798 - DNA, 286 bp, Glycine max
  Coding DNA Sequence Number=SeqID_4019
gcggctggcgtcgattggttcctccctcctcctcttccgtcttcttctctcgggtatatcttccgcgcggactgttgatctcagttgaagcctcaggcgcggcgcagcttgtcttcccaaaaaaatggcggcgggaagtctgtttccatgattccctcgctcggcgggactgggagaggttgggtgggttggatgtgatcgggattgccaagccatagcagttcttatggatcagctggctttgctcgcgacggagttcggagattcgtccgacttcgaggtcgac

SEQ ID NO: 13799 - DNA, 518 bp, Glycine max
  misc_feature (70)..(70): n is a, c, g, or t
  misc_feature (235)..(235): n is a, c, g, or t
  misc_feature (279)..(279): n is a, c, g, or t
  misc_feature (317)..(317): n is a, c, g, or t
  misc_feature (362)..(362): n is a, c, g, or t
  misc_feature (408)..(408): n is a, c, g, or t
  misc_feature (414)..(414): n is a, c, g, or t
  misc_feature (479)..(480): n is a, c, g, or t
  Coding DNA Sequence Number=SeqID_4020
gcaagtacggtcatgcgagtagtgtgtggagtgactattcatacaatacagctgctatcagtgcgtcttnatatcactatcgagtatataattaattgcatcacatatcaactaataatgagacatcttctactgagctagtcacagtgagtatgacgagtgtcatctgcacagtggcgtgcgacgtgatagacacgatctctactggagatcacacatagggcgatgattactnatcgctacaccatcgcgcactagcggctgccctatacctatccnaacatcacacagtgattactagctcgtcactccaattncccgctacgagtcggcgctcataatgcgtatgcaggtaggcatgnttggttgtggcgacctacactaccgtctcacacgcaactaatacanccatanatacatacatatttcctctatttgtcgtaattatcgtagtcagcgatccttcatcatagtgaagnncgcatcctactcataaccactgctacatagcgcgatat

SEQ ID NO: 13800 - DNA, 411 bp, Glycine max
  Coding DNA Sequence Number=SeqID_4021
agagttgcatacatctcaaaattactccgttttggcggggggggaaaaagtttgatgttgttcatacactaccacgtgggtagcaaagcctggttacttgggttcccccaagactcagtgaggataaagtcagccagtgtgtagatgcaagactaggaggagaatacccccccaaagctgttgttaaaatggcccctgttgctgccctgtgcgtgcaatatgaagctgatttcagaccaaacatgagcattgtagtcaaagcttttcaccctttattgaatgcaaaacatgggcctgctggtgaaactccaaactaatctttgtctatatttaaatcgggaccaaagagtatgtgcataagtgtgcccgtaaaaaaaaaccaagccctcccttcaaaagcggatggaaatt

SEQ ID NO: 13801 - DNA, 300 bp, Glycine max
  Coding DNA Sequence Number=SeqID_4022
tagttttagacacccttacctctctcttgtctccacgagtttctctatctctcttcggcctctttctccatgcgaacccactctctcgccgtcgttcttccgtggtcactggtcgctggtcgtcgccacctgcctctcgcctacggtcactgktttctttggggaagtagagacttgkttaaggggagtagatttgagggtttttctgagagggtttttttatctatgtgtgataatgtgtatgtgtatgtgtattaattgatgaaggggatatcatgctcaagctttcatttgaatctg

SEQ ID NO: 13802 - DNA, 316 bp, Glycine max
  Coding DNA Sequence Number=SeqID_4023
accacacttgtggtcttaactctgctttatatacaatagaaaaagctgtgtgtttcatgcttgttttgattccttctatcatgtgagtcatttctgtcttttggtgtcgctgtcgcgcggggaagaaaaagttgtgtttcaaatttcaatgacttctgctactagttatactccttcacctgaaaacaaacctcagatccagcacataattaacattcctgaacaaatggagcctgaggtgcatgatcaatgttgcatttacaaggttcctcatcatctcctgaaattgaatgtggaagcttatacaccacagttc

SEQ ID NO: 13803 - DNA, 551 bp, Glycine max
  misc_feature (375)..(375): n is a, c, g, or t
  misc_feature (433)..(433): n is a, c, g, or t
  misc_feature (449)..(449): n is a, c, g, or t
  misc_feature (451)..(451): n is a, c, g, or t
  misc_feature (508)..(508): n is a, c, g, or t
  Coding DNA Sequence Number=SeqID_4024
tacgccatcttatcatcttagcacacatttatggaggtatgctcctcaatcccctgtctactccctaatatacttctctgtgcgtcgcatgttcgtcctctcaatcgcaaacttccttcccctctccgctacactacatcctctcgtctctatttatctactctcctcttctcacaaaatacctctcctacacgcagcacgccacacgtataattcacacactatgtgacaacaagctctaaacctaacctgcttctccatccccgaccgattattccatctatagagtcgatacgctctgcctccgactcttcaccttcctgcaatgtatccccatttaatgcctattggtgactcgctctattatgactaccnaacttgtctctattctttaatccacctaatacaagactacacaacaaagggctatatnataagtgacagattananaactacaatcactttagtcattcctcatactatacaaacatcgcgcagctgcactcncgtcgcacatcatgtattaatcttctatatctggagcacctta

SEQ ID NO: 13804 - DNA, 564 bp, Glycine max
  misc_feature (81)..(81): n is a, c, g, or t
  misc_feature (140)..(140): n is a, c, g, or t
  misc_feature (201)..(201): n is a, c, g, or t
  misc_feature (208)..(208): n is a, c, g, or t
  misc_feature (227)..(227): n is a, c, g, or t
  misc_feature (235)..(235): n is a, c, g, or t
  misc_feature (261)..(261): n is a, c, g, or t
  misc_feature (485)..(485): n is a, c, g, or t
  misc_feature (518)..(518): n is a, c, g, or t
  misc_feature (527)..(527): n is a, c, g, or t
  misc_feature (539)..(539): n is a, c, g, or t
  Coding DNA Sequence Number=SeqID_4025
cttcttcactcacctatagatatccttacacactttagtgtatgacctgtcatcgcccggtggtgtggtgcgccgtacgcnctgctgtagaacatgggtgtcgcgcgcgtcgccgtctcagtctatatgtcgcgcgcgtncgctgcgcgtgcgcgctgtcccgagagcagaagaagaataaatacacatagactagtgatncgccacnacacagattagattatagncgcatatntatagtataagagcgatacgatactncactagtgctcgcatcagaatgcagcacacgtgcgtagccctgtgagcgtgtcccgaatagacgagcggtggtcacgacattccgagtcgagtactacatctcgatcacatgttcacagatcaacactcgcacatatgaacatgcagtcactgagcgaagacaactgctacacataaggtgtagcatcgacagccggcagtccacaccgaacactactgtatgnccaagcaaagtaagcagcgtgaaacaggcacangagtgtganggagaagatganataagaccgcgggttcgtgaatgcg

SEQ ID NO: 13805 - DNA, 556 bp, Glycine max
  Coding DNA Sequence Number=SeqID_4026
tcgccaatctcgaaaagcacgttgttgaatgcgatgaaaagttgaccaaggttcttcaagaaaattccgaagccatctcacaaataagaaccaaacttttaacagaaaagaaacaaagagaagatgctgaagttgatatgagcaagatgaaacctcaattagacaaaatccttgctgataacgtcgacttgagaagagaaagcgaactcagagaaatcaacgaaagattgactaacaagagagttgatgaagatgaagctttggataaagaaagcttggaagtcaagaaaaaactcatcgatgaactccaatctgaaaaagcgagattatttattgtcacagaaaaggatccaagattacaatcattgagagaagataacgaaagattcttgaaggaagttaagcaagctgaaaagaaggttgatgatgctaattacaaagttcttgaaactgaaactcgtcaacttttgagtgttagaaagaaggatgaggatcaagaagctagaaagaagcttcaagctgaattagacaaatggagagatcaactcgatgatac

SEQ ID NO: 13806 - DNA, 508 bp, Glycine max
  misc_feature (247)..(247): n is a, c, g, or t
  misc_feature (322)..(322): n is a, c, g, or t
  misc_feature (414)..(414): n is a, c, g, or t
  Coding DNA Sequence Number=SeqID_4027
ttatcttccttcctctaccacgtatgtggcagcagtcgctggcgagcacgccaccacaactggacaaggagggctagagatacaagtagaatcgtcagatgggaacgatcatgttacatggaaggtgatcattagatcgtgtcgagaagacttagtagggtgtgtctaagatatattcttctgtcatagtggcctccatgatatatatgctcacctcacaccgtaactaataatactcatatattcnagtttctatccttatctatttctttctgtgcgaataagagcaatgaaacaataaactcgtaaggttggcggactntattctttcttttattaattttattattctagaagttctgaggctcatcatataacaaaataattttctactcctaccttatatgtctatantctacaactctcgggagaggagaggcccattaacctcttgctactcttccgtaaggggtggcgccccaccctccactccaactcagaattgatt

SEQ ID NO: 13807 - DNA, 388 bp, Glycine max
  misc_feature (26)..(26): n is a, c, g, or t
  misc_feature (49)..(49): n is a, c, g, or t
  misc_feature (51)..(51): n is a, c, g, or t
  misc_feature (53)..(53): n is a, c, g, or t
  misc_feature (57)..(57): n is a, c, g, or t
  misc_feature (72)..(72): n is a, c, g, or t
  misc_feature (91)..(91): n is a, c, g, or t
  misc_feature (103)..(103): n is a, c, g, or t
  misc_feature (129)..(129): n is a, c, g, or t
  misc_feature (133)..(133): n is a, c, g, or t
  misc_feature (151)..(151): n is a, c, g, or t
  misc_feature (157)..(157): n is a, c, g, or t
  misc_feature (175)..(175): n is a, c, g, or t
  misc_feature (181)..(181): n is a, c, g, or t
  misc_feature (314)..(314): n is a, c, g, or t
  misc_feature (323)..(323): n is a, c, g, or t
  misc_feature (337)..(337): n is a, c, g, or t
  misc_feature (356)..(356): n is a, c, g, or t
  misc_feature (362)..(362): n is a, c, g, or t
  Coding DNA Sequence Number=SeqID_4028
gagcgggagagtcgtgtagctaccantcagacatatatctatctgaatngnangtgnaatcgggaatgacangattgctacgaagcagcancgatctcttctntgtccttcgcactctctcaactatcncaancgtggctcgagagacggngccgancaagatatcataaaccanacctgnatatcagacatacacagctggcgtgcaacagcgcactcgcgcgctcgcaggctctagcgctcgctcgctactagaatattacgcgcatcgctctgcgtgacgcgctcagagatgcgcgccgacgcgctgacgngcacatctnctcctgtccagctnctctcgcgcgcgtgcatgnccgtanctacacgtctgctgaggcacgtctgt

SEQ ID NO: 13808 - DNA, 570 bp, Glycine max
  Coding DNA Sequence Number=SeqID_4029
gactaaacaatcgataacactacttaatcgtcgttaactttgttgtatttttttaacaccacttaatcgtcgttaactttgtggtattttttaacgctacttaatcgtcgcatatttgatacctaaaatctgmttttatcaaccttttactacttttaatcgtcgtttaacccttttaaaaatagttaaattatataagtgactgaaccgttaacactacttaatcgtcgttaattttattttatgttttacactacttagtcgtcgaatatttttttaacaaaaatrtgtttttatcaacctttttaccacttttaatcgtcgtttaaccctttaaaaatagtttaattatttaagtgactgaaccgttaacactacttaatcgtggtttattttaatttattttttacaccacttaatcgtcgcattattattactgaaatctgtttttttttaatcaaccttctactacatttaatcgtagtttaatcctttaaaccatgtttttaaaaatattaacgaagtgactaaacgatcgttaacactacctaatcgtcgttaactttgttg

SEQ ID NO: 13809 - DNA, 280 bp, Glycine max
  Coding DNA Sequence Number=SeqID_4030
ccgcattgggatggagctgtacgtccactggactccaaacaccgatgagcacttgcacacgctctgtatctgatataagggggctgggcggagcgagaatcccatacactactaaagcgccacctttcaccgcgtgatccctaacttaatgtgacacggccgctacttgaccggcggcaacggcacctgaggctagtcaatctacggcgccaagttcgacgacgagaacttcatgaagaagcgcactggtcccggtatcctctccatggtgaacgcctgt

SEQ ID NO: 13810 - DNA, 475 bp, Glycine max
  Coding DNA Sequence Number=SeqID_4031
attctatggaatacttataactcgtatttttcagttttttgattttttttactaatatactacaatgattagataaataataacatttcgttatttttcactataattaaagttgaattatgaaacattgatgcgtttattctaattaatgtgatttcatgttaatattatattttataatgccagtgttatcaatggcgcataaccaatattctgccatacaaacactccattgtggcctatggcgctgccgaagcgagccttccttcataaattgcctatggcagttggcaaaagatccgccagaccattcccccatggcaccgccagttaacaataatgcttagccatacggcgtcatagtttttagaattcacattgttcacacaatcataatcatgtcatctttgatatgattctatatacgtggttcctaaatcaggccaacacatctctgtagtctcttgaaatggta

SEQ ID NO: 13811 - DNA, 129 bp, Glycine max
  Coding DNA Sequence Number=SeqID_4032
ttctgtgcaaaagccttgggaacacgtattggttgtgccatttcagagcatggaaagaacattcgagatctatcaagttcctttgtcaataagcaagagcaatacacttgtgaatgagcgctgattctt

SEQ ID NO: 13812 - DNA, 585 bp, Glycine max
  misc_feature (82)..(82): n is a, c, g, or t
  misc_feature (172)..(172): n is a, c, g, or t
  misc_feature (383)..(383): n is a, c, g, or t
  misc_feature (411)..(411): n is a, c, g, or t
  misc_feature (444)..(444): n is a, c, g, or t
  Coding DNA Sequence Number=SeqID_4033
atagtcgtgagtgcatgtcgggaccggcgccatgctactatacaatttctctacaccgggtccacgacgtccgtcgtttagntcaatacattcaatagatattagttgttaaacttctattacataagacacataacatacgactaagttcacaacttaacacgagcgcganacgtgcgagtcattgcgctggatgtgagatggagcgcactaaacgagtatagatataagattcgatacgtacataagcgcaggctacgtctacatagtgtgagctgcagtgaccacgcgcttgcgatgcgcacgcgttgtgcagtccgctgcgcctgacgtcgatcttgtatcggcgatggatgaagaagcagacattgaagcatgacaangagcagaaacgacgctgacagagagccngagtcacgcctatattgacgccgcggcgtctcntgtcaatccgctctcgagtggtgtctctgtgtgttagatgtctcattataattactaaatactgatttacataacatatgaagtcgttcctagtctcatcaatatagtcatcaccgcgaatccgctctatgcatctctatg

SEQ ID NO: 13813 - DNA, 373 bp, Glycine max
  Coding DNA Sequence Number=SeqID_4034
aaaagcgtgcgagaacctgtttagaaatacaagggggtgagaatatggggggggataaaggacaatggggggggggatataacaagagtttgactcccggtagactttaatgagccgatatcatccctacaaaaagggggtgaggacttggagtactattatcttgtggatcaagcttatgaggacggaaaatgaggaaacggggtccttcgggcactttatgttgctgactttgcagtttacggatatgcgtgatctgaaggtggtaattggaaaccctttaatcctttattaggagaaacctacgaaggtgatgaccccgacaaaggaattcgctgcttttccgagaagggcaggcaccatccaactctga

SEQ ID NO: 13814 - DNA, 542 bp, Glycine max
  misc_feature (176)..(176): n is a, c, g, or t
  misc_feature (343)..(343): n is a, c, g, or t
  misc_feature (431)..(431): n is a, c, g, or t
  misc_feature (491)..(491): n is a, c, g, or t
  misc_feature (506)..(506): n is a, c, g, or t
  misc_feature (512)..(512): n is a, c, g, or t
  Coding DNA Sequence Number=SeqID_4035
gaagctccacaaagtttgcgtacgaaagcacgcacagagcatctgtggtggatgtctagatagatgttcacttagttttgagtgacttatctcgtccacaatgaataatcttaacggcgcgcccatctccgctacgacattctgctctagcacctcaggtcgactccgatatactntcatctatgtgtagcatgctacaccacgaccactgatagtcagctatgaactctggatatctcggataagcactattggagcctaactgcacacgactatatcgatcgtcgtgtatctgatgacatgactgtctcacgccgcagctctcacacctctctgtctatgnacgccactgtaactcaccggtgcgtgcgagtacagatgacctctctcggctaccctcgctgttgtgtcgacgcctttgtctgcgcgtncgtccctctctccatcaatcgctgatcgctactatcgctatgcatcctactcgtgctcgntctgtctatcatctntatgtncacgccacgttgtgcacgactaggtcagca

SEQ ID NO: 13815 - DNA, 555 bp, Glycine max
  misc_feature (70)..(70): n is a, c, g, or t
  misc_feature (92)..(92): n is a, c, g, or t
  misc_feature (204)..(204): n is a, c, g, or t
  misc_feature (281)..(281): n is a, c, g, or t
  misc_feature (316)..(316): n is a, c, g, or t
  misc_feature (470)..(471): n is a, c, g, or t
  misc_feature (517)..(517): n is a, c, g, or t
  Coding DNA Sequence Number=SeqID_4036
atccagacagatcgctgctacagtgattgagatgagatccgatcgcatataatgtgtgatgtgcgtctcncatcgcaagtgcatatgctcancacgagcacgcgagcgacgacatacgagcgcgcgctatctacttacggctatcacacgtagtctcgaggaggaatcagagataggtacacaccgaacgggtgacgtgtgagngtgaagtccacactacgactagacttgtacaacgtgactctacatactcacgtactacagtgctaggacgatatgantgctatatactctccgcatgactacttcacctatnactctatacttagatacttcgatgcctcgtggtgtctgtccgctgatagaaacagagcatgagacgctcagaacgagctatcagcacagtgacgcgtcctgtgcgcaaagctcagagccgcgatagcgagagaacactccatcacatcacacannacaccactccatcggtgatcacggagactgattgtacccgatcgcnattcgcgcacacgcgagtacactgacacgcgcgacgtg

SEQ ID NO: 13816 - DNA, 496 bp, Glycine max
  Coding DNA Sequence Number=SeqID_4037
atgccaccctaaatctggtgaccttgatggtacattatctggtgactgttgatccaactctaccgcatgcgctgaactaccagcgaatctatagaggtggagatagtcagatctcattcactgcagattggccatgctggatgttccagggattctggttactgaggcattgggcttaagcatctgcgtaacggctcaagaatgcgcatcattttctgtgggccaaccaacctacttacgcgattcatttccatggtgcaccctacccaccatactggccattgaattacttgatattacctttgtggagcaccagaagagcatggagaaggacccatagattaagaaataccctgatggtgcttttgatcctttgggatactataaggaccctaaaacattccatgaatgcaaattcatagaactgaagaatggacgtttcgttttgatgtcttatgctagatactgagctcaacattcagcttattcatggact

SEQ ID NO: 13817 - DNA, 336 bp, Glycine max
  Coding DNA Sequence Number=SeqID_4038
agatctcagcgccatggattctgctcatgacgacggctttgcgctggagatggcggagctgccgctggagacgcggtgcccgccgttcgcgctgcgccagtactccggcttctagctgccggaggcggtgctggcgcgcggtctcccggcggcgcgcgaccggttcgcgccgaggccggacgacgtgctcctcgccagcttccccaagtccggcaccacgtggctcaaggcgctcgcctacgccaccgtgcaccgcgccgcgcacccaccgtccgctgacgaccacccgctcggccgccgcagcccgcacgactgcgtcccgttcctcgagatcag

SEQ ID NO: 13818 - DNA, 433 bp, Glycine max
  misc_feature (73)..(73): n is a, c, g, or t
  misc_feature (234)..(234): n is a, c, g, or t
  misc_feature (251)..(251): n is a, c, g, or t
  misc_feature (353)..(353): n is a, c, g, or t
  Coding DNA Sequence Number=SeqID_4039
acacccgatcctgatgcgatcttgttgagtctcctccttagcattcgatatcatccatgtaatctggtttcgnctatgacttccctgttgtattatactctcctgctctctcccaacctctcaatttatctctcttgggcggcgcatagacactacgctagctcgctcctcgtccgtttcagcacgatatctatatacggctgctctattccgtattacatcaaccgccgcagntccgtcgctcgctgtcngtcctgtgtggagacaataatctcttcctctccccctctcgcttctcactctctcctatttctatgggagaaaaactctcaccacatcctcttctccactcnccgccagcacagcaccctccctccctctcctcacctccacgcaccctcgttcctcgcccaacgcgtgataccagtttgtt

SEQ ID NO: 13819 - DNA, 447 bp, Glycine max
  Coding DNA Sequence Number=SeqID_4040
ggtcacatatacagaccttctctccctctctctctttctctctcaacattctaccttcttttcttttcctcttttcacaaccatttgtgagattcctccaatgttcttctctcttccattggattgtacagattcccagctacactacacacatcaatcccttcaattctagttgctgtgggattgtttgtttatgtgaaaaaattttaaggactgtaaaagacaaaacttttctgggtttattggtttctgctttatatttattttttcttctgcaaactatcattctgggtttgctcataaaacaaagcctttcaagataactgttgtatttttcagaaaaaaaatccatttttcttagcttatttgtcaaaagaataattttttttctttttcttcctcatttttctgcaaattttcttcatattcctttttattaatttgcgg

SEQ ID NO: 13820 - DNA, 511 bp, Glycine max
  misc_feature (76)..(76): n is a, c, g, or t
  misc_feature (83)..(83): n is a, c, g, or t
  Coding DNA Sequence Number=SeqID_4041
tagtctgtgagatgagcgcgtatcatgagacggcgcgcgctagtgtattatgatggcacttatgattctataactncgctgtnctctctcgcatcgttcgtcctctctatcgatcagcacagcgtgccatgcacgcgcacgcacgcatcgttgcatcgactacatattcacactctactgatgcgatgacagatctgatctatgaattgacagagcgtagtcataattagctctactccactcgcgacttcccctgcgcgcctatcgcgatacgatcatgttgagactagatgttatgacagtatgcgctcagtagtgaagtggaggcgaccgcgcgacgcgagtctattcgatcacatatatatgtctttttcgatacgagtattgtgtcattcggcacagctagagtgatgtaggtagtagataataaacaagtacagacacgttaatttatgagtgaggagacggaggtcctatacgtagtccgcatacgcaccgcagtaagcaagac

SEQ ID NO: 13821 - DNA, 314 bp, Glycine max
  Coding DNA Sequence Number=SeqID_4042
gtgtacctcataagggaaggtggaagggctcttgaattcatatacagcagtggcaggttgaaaacaaagggaggaggaacaggaggaaccgttgcaacacactactatgctgggggagaattcataatgaagcagaacaagaccaagtcatgcacttgtagccctcaagaagagatttctggtggagacgacaagcaatacacatattggtacctacttcttggcctatacttcactgaccaaggtgagtctataacctgaactattatctacagcatggggcaagctctcaccactttagaggaacgttggaa

SEQ ID NO: 13822 - DNA, 597 bp, Glycine max
  misc_feature (98)..(98): n is a, c, g, or t
  misc_feature (314)..(314): n is a, c, g, or t
  misc_feature (360)..(360): n is a, c, g, or t
  misc_feature (371)..(371): n is a, c, g, or t
  misc_feature (376)..(376): n is a, c, g, or t
  Coding DNA Sequence Number=SeqID_4043
gtcagtattatgtggcgcaccactaacatacaatctctcactgctcgctacttcatattgtaaacacacatctctatgtctatataaactcatatcgnataacatatgtcttatctcattgacatatacatgcgactgctgcctgtgtgcatgcataccattcatatagatataatactgatcatattgtcgtcacgctactacgcgtgcgcatcacgtctgtcacgtcgtacacttactcttatgtagtcatcacaatcatctgtacgtgtgatatgtaatcatctctattcgacaacagtataatctcttancgtcatctctcactcttcagtcgactcatgctaatttgttagtacnaatgtacgcantctcnctctggtataaagcaagtaacatgacttcttctatcttcgatttcgatctaatagacggagtagagcatatataaatagtagcatacatagagtactcatgtcatctatctatcgtactcattaaagcgcggagaagcgctataccatgctacgcgaatgtatccacagcattctctctcatgtccactcgtacgctacgcattgcgactcttctatatgt

SEQ ID NO: 13823 - DNA, 500 bp, Glycine max
  misc_feature (74)..(74): n is a, c, g, or t
  misc_feature (81)..(81): n is a, c, g, or t
  misc_feature (86)..(86): n is a, c, g, or t
  misc_feature (115)..(115): n is a, c, g, or t
  misc_feature (132)..(132): n is a, c, g, or t
  misc_feature (146)..(146): n is a, c, g, or t
  misc_feature (268)..(268): n is a, c, g, or t
  misc_feature (277)..(277): n is a, c, g, or t
  misc_feature (319)..(319): n is a, c, g, or t
  misc_feature (356)..(358): n is a, c, g, or t
  misc_feature (379)..(379): n is a, c, g, or t
  misc_feature (384)..(384): n is a, c, g, or t
  misc_feature (390)..(390): n is a, c, g, or t
  misc_feature (440)..(440): n is a, c, g, or t
  misc_feature (475)..(475): n is a, c, g, or t
  Coding DNA Sequence Number=SeqID_4044
ggtcgtcgtctctgtaggcgttgatgtagtagatattatagatgtgatacatgtcgttcgtaatatatcgaatnggggtangggtnggttggaggtgcgctctgcgaggcgaganatgtaatatatataatnaagtaatatatatntgatgtatatatattctatctgattgtatgtatattatggtaatattagttgatagtagtcagtatatcatgccgcagccacgcatacctccacctccgctctcgtacacagcgttgctatntgttaacanatagtgatgaatgtcgagatgagtctatgtagtattcgtacntattatctacgagggagacgttggtgagcgcagcagnnnaggtattattctttctcttcnttatntttctntcccctctcttactctactgtgttctctctgggcacgtctcgttttatantgtctagtagtatatattcatcttatcttcatctnctgctcacagtagtaatctagtatt

SEQ ID NO: 13824 - DNA, 247 bp, Glycine max
  Coding DNA Sequence Number=SeqID_4045
gcaatggcagtcttatcgatttatctggctaaatgataggagcacttgtagcccatgaagcattaatagtctacggggccggagctatgaaccgttttggagtggctcttttggtacccgaggagtctgtgtatgcaccaggtttaattttatgtccccatctagtcactttaggttggggggtaggtcctcctggggatgttatgagcgccagtccaaaagtaggggatgcagtacacctcttcat

SEQ ID NO: 13825 - DNA, 528 bp, Glycine max
  misc_feature (192)..(192): n is a, c, g, or t
  misc_feature (198)..(199): n is a, c, g, or t
  misc_feature (219)..(219): n is a, c, g, or t
  misc_feature (301)..(302): n is a, c, g, or t
  Coding DNA Sequence Number=SeqID_4046
gtctaagtcctttccctgacgatcccctttctttccggcgacagggcttccgccgccgtaggagagaaggtgccggcaaccgctccccgttcaaccccgtcatcgtcctccgcggccccggcgacgactccgccgccgccgccacacgaccgtgccagcacgttcgagctcttctacgacgacggcgatggnaccggnnctcgccccccctcctccacnatgtcggagttcctccctcgctccggcttcgaccgggtactgggaacagttgcgcagatggagatgaacggctttcggcggnncgaaaatccgccgacgtcaaaggcggcgatcgagtccatggccgacgtcgagatcggggaaactcacgtcgaaacgacgggcactgcgcgtgggggaaaaggagtgtttgagctccacgcgaaaggccctgagattgcggtgcaagacattaaccactcgagggcatcctcccggggtttccgaggggaaacccgggcgcggtgggccggcgaggtttccttccat

SEQ ID NO: 13826 - DNA, 576 bp, Glycine max
  misc_feature (82)..(82): n is a, c, g, or t
  misc_feature (85)..(85): n is a, c, g, or t
  misc_feature (120)..(120): n is a, c, g, or t
  misc_feature (240)..(240): n is a, c, g, or t
  misc_feature (242)..(242): n is a, c, g, or t
  misc_feature (312)..(312): n is a, c, g, or t
  misc_feature (364)..(364): n is a, c, g, or t
  misc_feature (376)..(376): n is a, c, g, or t
  misc_feature (427)..(427): n is a, c, g, or t
  misc_feature (457)..(457): n is a, c, g, or t
  misc_feature (490)..(491): n is a, c, g, or t
  misc_feature (513)..(513): n is a, c, g, or t
  misc_feature (531)..(531): n is a, c, g, or t
  Coding DNA Sequence Number=SeqID_4047
gtttatatacatctcacactccgcgcactcctcaccacacgtttactagtgcgttcagtctcatgacactgtctgcataaanacncacaccgactatgcgatacacagctcctggtacanagcggagagagtgtgtgagtgggtcggtgtcacactcatcgctcgtactgcacaatattagcgacatctgatcgtgcatgctgtctacactagcactcgaatatagtagagtcgacgtgncnctcggactcctgacgagcctgcaacgaccgcgagagatcattgctatacagacgcaagcgactgaacacnaaccacataattgattacacacacgtacacgagagacagctgagctggtcgnagttactactanctagtaacacgcatccgatacactgcattcgcgtaggattccggcgggctncaacgacatgtgactactcgcactgactgnttagagtagcgacgacgtctacgctcgcgagcnngcggcacacagcgatactcgcntttcgctcacccgagganagcagtagaagtggctatactcgtcgttcagtgtactatctctag

SEQ ID NO: 13827 - DNA, 214 bp, Glycine max
  misc_feature (40)..(40): n is a, c, g, or t
  misc_feature (57)..(57): n is a, c, g, or t
  misc_feature (64)..(64): n is a, c, g, or t
  misc_feature (66)..(66): n is a, c, g, or t
  misc_feature (68)..(69): n is a, c, g, or t
  misc_feature (77)..(77): n is a, c, g, or t
  misc_feature (80)..(80): n is a, c, g, or t
  misc_feature (91)..(91): n is a, c, g, or t
  misc_feature (94)..(94): n is a, c, g, or t
  misc_feature (98)..(98): n is a, c, g, or t
  misc_feature (101)..(101): n is a, c, g, or t
  misc_feature (108)..(108): n is a, c, g, or t
  misc_feature (115)..(115): n is a, c, g, or t
  misc_feature (128)..(128): n is a, c, g, or t
  misc_feature (150)..(150): n is a, c, g, or t
  Coding DNA Sequence Number=SeqID_4048
acatccgaactggactttcatcgtgcctgcggaatatgancatagcgaacatcccancttatgncngnntgatgatnaangcatgaactanagnaagnggngattttngcgctcngataccctaatanttatatcgattatggatggtgntttgactctgattctgaagcactgaaaggcttcttggccatgcctagggcaaccaccaagtaat

SEQ ID NO: 13828 - DNA, 574 bp, Glycine max
  misc_feature (38)..(38): n is a, c, g, or t
  misc_feature (83)..(83): n is a, c, g, or t
  misc_feature (119)..(119): n is a, c, g, or t
  misc_feature (128)..(128): n is a, c, g, or t
  misc_feature (134)..(134): n is a, c, g, or t
  misc_feature (144)..(144): n is a, c, g, or t
  misc_feature (178)..(178): n is a, c, g, or t
  misc_feature (207)..(207): n is a, c, g, or t
  misc_feature (306)..(306): n is a, c, g, or t
  misc_feature (309)..(309): n is a, c, g, or t
  misc_feature (364)..(364): n is a, c, g, or t
  misc_feature (379)..(379): n is a, c, g, or t
  misc_feature (414)..(414): n is a, c, g, or t
  misc_feature (425)..(425): n is a, c, g, or t
  misc_feature (547)..(547): n is a, c, g, or t
  Coding DNA Sequence Number=SeqID_4049
ataaacacatagacccacacgactcacatctaccctcntcatacgtctcacgtactctcagtacgacgatccgcacatcacantcactgcacgtggtacataaagacatcaataaatgnagtcacgtngttatnatgaatatgnccctacgtgtgtgcgcgtgtcagtctattcgtancgagtcttctcatcatccgcgtctctacnacgtatcactataccgattatctccacacacatatcctcaactaatcacaacagtactcgtcaccgaacagctatcatcgtcgcacgcgcgtcgcactnctnatgcgcgctatccatgaactaggatgtacgcgacacagacagtgacatgacggcnacgtcgacggtcgtntctcaatctcgctgacaaccgctacactaatatantacgcatcgantacatcacatatacacttatcatacatcagagcccacacgacacaagagacagcacaccgacgaaagagacctatcctgctacgcgcgcgcgttcagctcgaatacatcgtcagtattcgtncgtcgtgcgctgtggtcgtcattgtac

SEQ ID NO: 13829 - DNA, 519 bp, Glycine max
  misc_feature (327)..(327): n is a, c, g, or t
  misc_feature (492)..(492): n is a, c, g, or t
  misc_feature (494)..(494): n is a, c, g, or t
  Coding DNA Sequence Number=SeqID_4050
attatagatatccatccgctcttcactcaccaacaatcactcccacaccactcaatctctatcattcattagttatcctccatcattaactaataacgttgtcgactactatatctattcatattcatacatcacttttcttcacttcttgttctccactatctttttcttatatatcctctgagctagcaacaaagacctcattcgctctcccactccaaccacactgccagaacaacctctactcccctgtcccacacaccccttcccgcccgcgccgcgcctcacctttgtcccctcctcccaacgggtgagaccaaacaaacnattcttccactcctattctctgctctctactctcttccattccatactacatcattcagttattcgtatctatcctgttctttttctgatatctgtaattaatctctccccgtcgtatgaaataaatatcactctctatcgtctgtgcagaagaagattggatcnantctttgagttcgtcagtggatgaga

SEQ ID NO: 13830 - DNA, 468 bp, Glycine max
  Coding DNA Sequence Number=SeqID_4051
ttgcttgttcggttgttatcattgttttcaaatttggcataatttctatctcataattaattggaatcccttcatgcaggaaccagatgctcccaaagttcttctggttgagtcgattacttactagcaatgatattcacaatgggaagcctttatagcaggctactttgattgattcccaaactatggcttagttacaaatattttggtggtgatgtttcatacaccagtccagtgttgctacccaatgatgagttgtatgaagcactttgaaatgctttgaagaaagtcttttaggtggtggttctactgatgctacttctgtgacagccaaggcgtaggttgcagctcgcagagctttaaggaggaaaggaagacatgatttcttcttgaagaggccttcaagtgcatgtggaagtgtagcatgcaagcattatgcgacaatgacacactgcttatcgtacgctc

SEQ ID NO: 13831 - DNA, 551 bp, Glycine max
  Coding DNA Sequence Number=SeqID_4052
ataatcgagatcagggcaacatcttaatctctgccaaatttgttgctcaatctgagtgtttttcagtgttgtgatgcaggttgctttcacctcaaagaaggattatggaaaaggagggagagagagagagaagcacaagctgaagctcaacacagtttacatggtctgaatcctcttgaaatagtcaaaatcttgaatgaagaaamcaactatagagaactgtttgaacaggctaggaaatgtgctgaagttgcaaggttaagggagcttcacagtttacacactaaagggccatatcaagtctgttgtgaaactccagggacttgacattgagacatttcagcagcactacaccgtttgagtgactcaagttctgcgcaaaagagagattttgaagacaagataaaagcagcacttattctttgtacattgtcattattatttttcacctcatgaatcatgatgacaatgaactgtgatcttttgattgcttttagaatttgtcttcaatattttgttatatccttcttcaatactttccctggagagag

SEQ ID NO: 13832 - DNA, 514 bp, Glycine max
  misc_feature (412)..(412): n is a, c, g, or t
  misc_feature (457)..(457): n is a, c, g, or t
  misc_feature (469)..(469): n is a, c, g, or t
  misc_feature (473)..(473): n is a, c, g, or t
  Coding DNA Sequence Number=SeqID_4053
gtgcgcttgcgctaatgatgacaaataatcgctctatctacactatagggctcggcccctcccccacgattatatattactgcgcgacacactcgctaccagcgctcgtacttaaaatatatattataacgccgcccagacatataattacacgccgacctccctcgtgagaaacttgctgtttaaaataacgagcgcgtaccccccgccgccgcccgaaaatatgtagcatcataaatatttgtattatatagatatcatgtgccgcgacacgcgtcagtagctgtgcccatgatatacatcggtgcgctatgggccgtgagcatatgtggtataatgaagataggactgcacaagcgcgtgggtgataaagcctcgcgcggaagtaaaccacagagcgacaatatctcanccgctcgcgcgcgtgcgcgacattggagagaatcgacggtacaantacagacgcacnctgngcatgctatgtatgtagataatcatctcactcatgctgacg

SEQ ID NO: 13833 - DNA, 421 bp, Glycine max
  Coding DNA Sequence Number=SeqID_4054
aaccctttgaagtgttgtcattactcattacacaaagaggcaatggaggagtcaaagaaatacgagaggatggtgaagcagacaatggacaagaacaagaagaagaataacaaaaggggtcatggctctgggtcaggatccgggttgcttggggtgaaggtgaggaagctccaaatactgataccgggtggaaagagatgcaaccacccggatctgcttttatctaaaaccgtggattatattgtccacttgaagttgaagattaggttccttaaagcactctcagatatgtactctctctgaaaatcctagcactattcttctgcttcttcctctcttcgttgtcatataagctatggtaaggattttatttctatgtatatcaattgtcatttggagtttgctttatgtcgtattttca

SEQ ID NO: 13834 - DNA, 408 bp, Glycine max
  Coding DNA Sequence Number=SeqID_4055
tccttttaaatacttacccattgataagttaggtaaactagatcaatcaataacaacatattcttaattatatgataccgtaaaaacgtgtagttgcgcacttacactgttaaatagtaatcacgaaattgaaattgcgaattattcattagaccgatttgctaggacgatcgagtgaccgcagggggacacattgagtccttcttcagagaatgtcaccatgaccaacgaaactccttacacccaaccattggttcactacgggaaatcgttaactaggggtcattcaaggtgctatagtgttgttatagggaactcgcactttggtgtccaagtgtttttaaagaaaaaaaattagaaaattacattatctttttaatacataacatctgatctcttcaattcttt

SEQ ID NO: 13835 - DNA, 424 bp, Glycine max
  Coding DNA Sequence Number=SeqID_4056
ctgttagttcctgtcctttgataaactgattgctgaccctcgcagtggataggaactcgtccccttgctaataatgtcattctgggggcgcctaactccggatggacatgaaccaccttgtataccggaagccgggcgaggactacatgaaacatagaatgttcaagccccaccgtccccctgtgttggagaggccgatacaccaaaaccatacacgacaagatgcgccagaacaagtgactacagtaacgcctatgactgctcgattactgcggattcggaatctgtagcgtctcttggactacctccttcttgatcaagttgtctaggagaataaggactgactcagccatgcgaggagtattgtacccctcacctatccctagatgatgatgtccgacggtgtcgcactgaacgctttaaa

SEQ ID NO: 13836 - DNA, 555 bp, Glycine max
  Coding DNA Sequence Number=SeqID_4057
cggtcatcctcatcttatgtacattacaatgcattctattagtgctcgtgcgttcacgcgagatgaaaacaaaaaaatgtgattataacgtagttcggctcgaaatataataatgtccactcgtgatttaggatgggagagagttagagggatacagtgaatttgacacatagtacgctattaccatcgtctcacaatcgtgtatactaatgagtacaagacataaggtcggcgctatatgcacgtgtgtaagcggctcgtcagcgctgtggtgtcgctcgcatccgccactcaccactcgcccgcgtacattgctcgtagtgtatgtgtatctttattgtgagtgaggagagagatggagtcaatagtagcaacaataataaccagctagaggcacagaaggccacagagtacgatctattaattggttcgcgagagtgttgttcgcgtacgagatgctgagccttcctttcacgtggaagggggtggtggtgtattcggctcttgttctccaacctctcgtcagttaagatatctctctccatctacatttgt

SEQ ID NO: 13837 - DNA, 557 bp, Glycine max
  misc_feature (96)..(96): n is a, c, g, or t
  misc_feature (157)..(157): n is a, c, g, or t
  misc_feature (179)..(179): n is a, c, g, or t
  misc_feature (218)..(218): n is a, c, g, or t
  misc_feature (229)..(229): n is a, c, g, or t
  misc_feature (333)..(333): n is a, c, g, or t
  misc_feature (407)..(407): n is a, c, g, or t
  misc_feature (421)..(421): n is a, c, g, or t
  misc_feature (426)..(426): n is a, c, g, or t
  misc_feature (482)..(482): n is a, c, g, or t
  misc_feature (524)..(524): n is a, c, g, or t
  Coding DNA Sequence Number=SeqID_4058
atatagcgctctctatcatgtcacgctctacacccgtgcgaggtcgtcatctttatcggcagagcatggcctgataatatatgatattagacgtgngaacacaatctatatctactcagcgcattgtgctctctgtcgtactatatgtgccaccggnacacaatgatccacacagatangagttagcgtgtgtggatgtaacgccaatatcctagcantattatcgatngagtgtgcgaggctactacataacgtcagtcgtctgctctctccacgcgcgcatctatcgcacacgttgacgatataaatatataagaatatagcatgcgaggntgactgcttctattacccacaacacatggacgatgtatatgacacactatatgacgaccatttatatgcacgancgcgttcggatggnatgtncatgagatcgccgctcgcccgatcatcactctgtagctattgacatactatgactntcgcaccgtctgtctcttgataccagagagtgagtgatcatngatgatatatacaagtcgtcgtgtgcgtgacag

SEQ ID NO: 13838 - DNA, 424 bp, Glycine max
  Coding DNA Sequence Number=SeqID_4059
gataacaggacagcactctctaatagtatgcttgtgtctcccctgggtaattgtaagcttctgaaacagactataatttacgccaatagtctcagatgctgcaggtggcttgactatccggcatgcgggacgcacttggctccactattctctggatataacaagtgtgcggttcttttagctcgtcgcacttccagtgacagtatggaaggggctacgagatcgtatatatattttgttgagtccttctggcctcataaccaacgatccatacgacgacctgctgttgtcgaggtgctctatctatctcgagggctggatagagtaggctcctgtgcgcgctggtgggcgaggagaaagaaaaaagagagaaggtctctcactgcctcgcggggccggggcgcctaccttctagttgttagat

SEQ ID NO: 13839 - DNA, 569 bp, Glycine max
  misc_feature (219)..(219): n is a, c, g, or t
  misc_feature (252)..(252): n is a, c, g, or t
  misc_feature (265)..(265): n is a, c, g, or t
  misc_feature (405)..(405): n is a, c, g, or t
  misc_feature (435)..(435): n is a, c, g, or t
  misc_feature (490)..(491): n is a, c, g, or t
  Coding DNA Sequence Number=SeqID_4060
ctctctttccatacatcttcaggagagtgtactagatacgtgtgcgcgatctcgcatgaaacaacagtgtaagagtgagagttgttggtagtgatagtagcggtatcgcacactaccacgacgtgagcctccacaagaatcggatgtaaatacatatatagatataaataatctcataccatccaagacgatatcagatatgtagagttataataatgntttcatcattagattactaatatacatgagcgnccagcacagtaanatactcgagtcgcatttctcacacggtgtatcattatagatcattggataacgctcgcgctgtcatcagtcttcctacatgaaacatcaagtagtaaccatgtgtctacaatattgacgatatatctatattactatganggactctatgattatatataattgactatntgtgtgttactctctcttctctgccattagatgtgtgatcttatatatgtatctnnttgacgcgcatgcttgtgctactatatcgtaattggtctgacagtagccttatgtatcacttatacactgatcctcgt

SEQ ID NO: 13840 - DNA, 500 bp, Glycine max
  Coding DNA Sequence Number=SeqID_4061
acagagacttatcctcctacggtgtctctctagtcgacggtttcaacgttccgatgacagttactcctcacgaaggccgtggagtttgtcccgttgttggttgtcgcgaagacctcttgagaacgtgcccggctcatcttcagctccggtcgggacacggtggacacgtggtggcctgtaagagtgggtgtgaggcgttccgcacggatgagttgtgctgtaggaaccattacaatagtcctcaaacatgtcgtgcttcgagccattcgctgttctttaagcacgcgtgtccttcgactatgacgttcgctcatgatagtccatcgcttatgcatgattgttcttctcctagagagctcaaagtcatcttctgccactaatgtgtctctcttgttcggtttattctgtatggttgtactagtgatatcgcactaatctcttatctttctggtttgattggtttagtttgtgatttcccgcgtcagttatgttgttgttca

SEQ ID NO: 13841 - DNA, 550 bp, Glycine max
  misc_feature (32)..(32): n is a, c, g, or t
  misc_feature (39)..(39): n is a, c, g, or t
  misc_feature (43)..(43): n is a, c, g, or t
  misc_feature (50)..(50): n is a, c, g, or t
  misc_feature (134)..(134): n is a, c, g, or t
  misc_feature (146)..(146): n is a, c, g, or t
  misc_feature (187)..(187): n is a, c, g, or t
  misc_feature (192)..(192): n is a, c, g, or t
  misc_feature (200)..(200): n is a, c, g, or t
  misc_feature (202)..(202): n is a, c, g, or t
  misc_feature (220)..(220): n is a, c, g, or t
  misc_feature (259)..(259): n is a, c, g, or t
  misc_feature (293)..(293): n is a, c, g, or t
  misc_feature (318)..(318): n is a, c, g, or t
  misc_feature (329)..(329): n is a, c, g, or t
  misc_feature (362)..(362): n is a, c, g, or t
  misc_feature (366)..(366): n is a, c, g, or t
  misc_feature (383)..(384): n is a, c, g, or t
  misc_feature (387)..(387): n is a, c, g, or t
  misc_feature (395)..(395): n is a, c, g, or t
  misc_feature (405)..(405): n is a, c, g, or t
  misc_feature (451)..(451): n is a, c, g, or t
  misc_feature (461)..(461): n is a, c, g, or t
  misc_feature (463)..(467): n is a, c, g, or t
  misc_feature (469)..(470): n is a, c, g, or t
  misc_feature (511)..(511): n is a, c, g, or t
  misc_feature (515)..(516): n is a, c, g, or t
  misc_feature (518)..(519): n is a, c, g, or t
  Coding DNA Sequence Number=SeqID_4062
agagacctcatgtgttcgcttcacgctataantttgttntcancttaganttggcttgtgtatagtcacgagtatagttagtgctattgatctaaggtgtgtgagagacgcgccatctcactcgagctacgcgngtccatatattntcgtctctcatgacgtccgcgtacagagcgcgataccaganattangtctacananaccgatactagtgcgtantcacgactgttcgcatctgcctttcctgtcgtaattaancaagtgagagacagatattatcaacgtaggtatncactacgctagtatatatagttttntctgatcagtngtctaactcacactaacgacgttaacagatgtnctcnattgacgaatcgtgctnnttntctgtgtntgtccggtgntttctcaaactgtcgcacatcgaactacgacgctgacatcaccacntcacacacantnnnnngnntatcagtagagacaatcgctctatgccatcagaacgaaacnggtnntnncatgcatgactccacgacttcagatactata

SEQ ID NO: 13842 - DNA, 532 bp, Glycine max
  misc_feature (119)..(119): n is a, c, g, or t
  misc_feature (137)..(137): n is a, c, g, or t
  misc_feature (199)..(199): n is a, c, g, or t
  misc_feature (320)..(320): n is a, c, g, or t
  misc_feature (334)..(334): n is a, c, g, or t
  misc_feature (344)..(344): n is a, c, g, or t
  misc_feature (383)..(383): n is a, c, g, or t
  misc_feature (385)..(385): n is a, c, g, or t
  Coding DNA Sequence Number=SeqID_4063
agatgtgacatctcgcgacgtggtcactacacgtgaagattcgctctgttactgattatcttcgatgctgcgcctcctctctattctctcgcgcgctctcaacgacgtctggtcgttcngtcacacctcctcttcangctctagttgcgtgctatatacttcgcgaagttctctcctctgctcgagtcgctcgacacanggatccactacgagtagaggggaccctcttgtggtgtcgtctacggtcagtgtggtattagtctctctgtctctcaattcacacttatatgcccctatatatctctctatatcatcctctnctctccagtcacgncgcacgtgtnggggtgtatatacgatcgcacgtcgagcgatagcagtancncacgcacgcctctcatggagctaatagctggcacataccactagcgcctaggctatactccatgtgtacacactccgtatatacttcagtacatcattggcacagtgtcactgattcacgtcatcagacatactctaccgctatgac

SEQ ID NO: 13843 - DNA, 266 bp, Glycine max
  Coding DNA Sequence Number=SeqID_4064
caatatacagtacagtgtcatatatttagaataaagaataaacagattttattattttatttttttgggtgaggaggaggtgatcaatcatgaacgtggcttgtgtaatagtacttagtatgacaatcggtcaagtctacatgcaattttgtgtaagtcttttttggaaaacaaattgtattggaattgctaggaatgagaaaacaacgtgtcacagttgcattatgtttttaaaaaagtaaaatggtaccatagacaaaactgct

SEQ ID NO: 13844 - DNA, 341 bp, Glycine max
  misc_feature (81)..(81): n is a, c, g, or t
  misc_feature (127)..(127): n is a, c, g, or t
  misc_feature (154)..(154): n is a, c, g, or t
  misc_feature (159)..(160): n is a, c, g, or t
  misc_feature (163)..(164): n is a, c, g, or t
  misc_feature (166)..(166): n is a, c, g, or t
  misc_feature (169)..(169): n is a, c, g, or t
  misc_feature (191)..(191): n is a, c, g, or t
  misc_feature (195)..(195): n is a, c, g, or t
  misc_feature (210)..(210): n is a, c, g, or t
  misc_feature (224)..(224): n is a, c, g, or t
  misc_feature (226)..(226): n is a, c, g, or t
  misc_feature (252)..(252): n is a, c, g, or t
  misc_feature (255)..(255): n is a, c, g, or t
  misc_feature (287)..(287): n is a, c, g, or t
  misc_feature (309)..(309): n is a, c, g, or t
  misc_feature (313)..(313): n is a, c, g, or t
  Coding DNA Sequence Number=SeqID_4065
gctctgcgtcttaactaagaagcgagctgtcggctctgccatcactctctcacctctctctacgatcccgaccacgcaccnacacacacacaccacggcccaccgcccatagagatgatggtgtagntacgcatgttcataagctatcagtcgngcagnngtnntntantatttcatatatagtactcacnccanagacacgctgtctantctattaatgtatngnagaagtgagatatatgaatatctatntcnacttcctgtcgtagcgcgatgagtgcgagtgngcgttgggttggtggtgcgggnctgnggcgcgacgacgcacgcggacgagggtg

SEQ ID NO: 13845 - DNA, 330 bp, Glycine max
  misc_feature (282)..(283): n is a, c, g, or t
  misc_feature (287)..(287): n is a, c, g, or t
  Coding DNA Sequence Number=SeqID_4066
atcaaagttcgtgcactgaaaaaaatatgagaggactctccagaaactccggcaccgcggcgattctcgcgatctttgcaatcctcgccgttcagcacttgaccgtagccgctgatttccttccgttggagacagagtgccgcggtaccatcgccgagtgctcggtttccgccgcgctcggagaagaaggagatctattctacggcggaggaatgggagcagagttcgagatggactcggagatcaaccggcgcatgttatcgaacaggaggtacatcagcnncggngcgctgaggagaaacagtgtaccttgctcacgacgcggcgcat

SEQ ID NO: 13846 - DNA, 512 bp, Glycine max
  misc_feature (224)..(224): n is a, c, g, or t
  misc_feature (290)..(290): n is a, c, g, or t
  misc_feature (364)..(364): n is a, c, g, or t
  misc_feature (487)..(487): n is a, c, g, or t
  Coding DNA Sequence Number=SeqID_4067
tgtagcaaaactaacgggtatcgccccgctccatcgtcggccttgcttctagttcctatccgacgcagctatacaccgagacgcatcagagtaagcgcaatgtgcgccactcaccaacactagcgcgctctatttaactacagcgcacacttaattcgtacccaacgacccaagatccgccgcaacctcgaagtgaataacccatccaccgcgccgaccgcagncgtgtcgcgctatcaggacgtgcggataccgcacacacccatccacgatcagaaaagatccatgantggtgcggtgaatgtccagcgcggacagccccgtctctcctctctgacgcctacggcgcacccactcacgacanacagtccattatcccgtcgcgcgtacatacaacacaacattcaccacccgcacgcaacaagtaccataataacgactgtctccactactacgccgcggccagctctatatcaatgaccgtganatgagcagcaacaccttcgcactca

SEQ ID NO: 13847 - DNA, 583 bp, Glycine max
  Coding DNA Sequence Number=SeqID_4068
gcgaaagttcggtactctactgtgaatacaggtgcgagagacaagaacacacaatctatcgaagagttttatgcgagagacagcagagcggctgttatttaggcggatgcggagtggcgccacgtcaccctcatgttaatcctactcctctcctatattccacgatgtctaatgttgcatgtctgctgagtctccgagacggagcacttgactattataagataatacatccacgagcgtcatcaaatactcacgcgccgatccgttctgtaagagcaaaatcaaggaacaggtcgcagccatgagtacatacatgcgcgacgttgatatttaccgtatgattgatatcgaagtgtacccgtccgacacactactcgattggcacagtgtggagctgcggcggcgagacatatctaacggcacgttctgctgtaggcaatcattttagagctacatgattgtataaacagaattgcctctcgagccccgcgaggatccgccctgagttcatataagcgtgagttctcctcgtgggtggatctcgcggctttgtttataatatttcggcttcgacatgtctacg

SEQ ID NO: 13848 - DNA, 161 bp, Glycine max
  misc_feature (92)..(94): n is a, c, g, or t
  misc_feature (131)..(131): n is a, c, g, or t
  Coding DNA Sequence Number=SeqID_4069
gaactttataatgcttccacatgtgctgctgaataaaagccagcttctattaatgatccacacgctgatatttttgaagatgcaccatttgnnnctacaatgccctagtacggaactacaagcatggtttntctgggttcgcagcttgtttattaaaagag

SEQ ID NO: 13849 - DNA, 573 bp, Glycine max
  misc_feature (92)..(92): n is a, c, g, or t
  misc_feature (249)..(249): n is a, c, g, or t
  Coding DNA Sequence Number=SeqID_4070
gtctctatgaatgacctacctaataactacgtatgttactcagcccagaaggtaacgagagggaaccacagctaacagatagggcgcaatgngccaccacagacaactatagggaaagagagagggagaggatatatgttataatatgtagtgtgaatgatgtttatcatttattcattatattattcacaaactttaacaaatatatacaacaacgcagatatatgatacaaacaagaaggatggggnttagaaggagggattccctttctttcggctgtgggaggtggggggtggctgctatagatgtggcgcggaatccatgtaggtgacgacctgattctacacctttcgcttaatagcgagaaggtatatgtatcaagtttgagatgtatagaaggaaggtcgaagatgaaggaggagttgtagggtgtaaagaagaggagagaggaaatgagaggataagagagatatggcgagagacactgtgagcaccatatatgatatattcacatctaggggttggggtgagtggggggagagaggtgggcggctgagaagagtaaaccacaa

SEQ ID NO: 13850 - DNA, 408 bp, Glycine max
  Coding DNA Sequence Number=SeqID_4071
tccaatttgtttaatcttcctttcttttctctacccattttcttcttcttcttctcccctccttttttccttcttctaccagcttctagaacaaggatgtgcccatttcctgcttacttgaatctcaaacacaaaactgaatctttgacaacaatttcaagattttcccaccaacccaccacagcaaagcacctggtcgcttcaaagatctgatttttagttctttggggtggggtttctaccgtttttccttccaccattggcacctgcagcagaaccaaattttgaacaaccagaatggtcaacactttatggtcactttgtgtgggtttaaacttgttggattcttggtgggtttagtttaatttttgactgaacgaatgagatcttgctcttggttggggacag

SEQ ID NO: 13851 - DNA, 551 bp, Glycine max
  misc_feature (40)..(41): n is a, c, g, or t
  misc_feature (467)..(467): n is a, c, g, or t
  Coding DNA Sequence Number=SeqID_4072
tattagccctgaatattagagccaggtcaccgcaaactgnnattggtggcattgggatttgattttgaatgttggctggtatccacctttttttgatgcaatccttttggaatttatgagaagattttgggaggtcgtatttcgtttccatctcatttggaccctaatgccaaggatttaattcgcaagctattagcagctgacagaacacgtcgccttggaaacttaaaagggggtgctattgatgaaaaacacacaagtggtttaagggagtggattttgaagcattaattcaaagacgtgtgaaccctcccatcatccctgaagtagaacacgagggtgataccaattacttcgaaaaatatgatgatcctgctgatattgatgatacaccgggagacccatatcgaggactattcaaggacttctaatgttgccactcatgctgcaaaaaaaagtaatttttntgaatatccacatttagcaagatcattatcatccacatgagaaaaccatttgtttgtacgtggaagatccatgctgtaaatatt

SEQ ID NO: 13852 - DNA, 175 bp, Glycine max
  Coding DNA Sequence Number=SeqID_4073
agcatggagtccgacgcgaccgattcaccagatccatcatgacggagtacactgaagcacgcatgaaatttggtggcgccaagcaactttttgttgatgcccttcttacattgcaagacatgtatgaccttattgatgacaccatcactgttcttctttcggatatgatcacagc

SEQ ID NO: 13853 - DNA, 526 bp, Glycine max
  Coding DNA Sequence Number=SeqID_4074
aaaggaagatgattactctccaaagaaagcttgatgaagagagaggattgctcaagactttggctgataattatgaggctacaaaaggcaatgacaagatcaatgaagaaagcactggattgattgaaaatgagcaacctgctcctgaagcctcaagtttatcagatgctacaggtggcttgatctcaaagaatacaatcatcataaaggctgttagaataattttacccgcgattttaatttattcactgccaaacagtgcttttacagttcaaatggatgcctcatatttgagtcccttgagcaattatcttggagaacagaaaggtgatgtttacctgttttcaagaaaaattacatggattgttttctctttccgcacgattggaagacttaagaaacttgtcaaaggtgtgtctttcggaaagagttctggttcaaatgttgaacctaaaatgcaaggaaagcaaaaagttgaatagaataaataatgttggattgcttgtcttgacatggtttttcgtga

SEQ ID NO: 13854 - DNA, 390 bp, Glycine max
  misc_feature (68)..(68): n is a, c, g, or t
  Coding DNA Sequence Number=SeqID_4075
gtccgatcattgatctgatcaggcaagtgggtcagcggattagtagccgaactagtgagtaactaatngaaccagtttgacccgatatatattaaaatattaaaaaaaagattaaatttgtttttgatccttgatatatacctgaattttacgtttgatccatgataaatttttccttcttatttgttcgctgatgtttgaaaagttttattttagatccctaccgtcagttaagtgatgatgtgtatgttaaatatttgataatgcgatttgtgtctgctcaaaaattgtcaatgttggtttcaaaatcaaatttaaattttctgtcagttaaaaccccccaaaattaattaaagtaaaaaaaaaaacattgagaaggtcctctctttc

SEQ ID NO: 13855 - DNA, 438 bp, Glycine max
  Coding DNA Sequence Number=SeqID_4076
tgggtattcatggtcaacattcagacaccaaccaacattgccgttatcaagtattgggggtaaagagacgaaaccctcatcttaccgctgaacgacagtatcagtgtcactctcgatcccagccacctctgcaccatcacccctgctgccggaagtcccgctttcccccccaatcccatgtggctcaacggaaaggaaatttctctttttttttccccccccccccagggggagaaggggagatcccctctcctcctctttatactcaaccaatccaccaacgataataaaattctgaccgcacgagggggcccaacccaaaggacccaatttctttcgaacccacacctcctaaccccctcccaaagactcccttcccacccgcgcaacacccaccacctctctcacccccccttgcgcttctacgccatcgctcga

SEQ ID NO: 13856 - DNA, 566 bp, Glycine max
  misc_feature (541)..(541): n is a, c, g, or t
  Coding DNA Sequence Number=SeqID_4077
tgctcataatgcgagacgacggatgagtgtagtacagacgaatgagatcaagatactgatatgagacgagcgagtatgtatgggaattaattgaagtataataacggctctgcctagtacgctaatatgctctacgtctggttctggtatgttatgtgtgtagttgagatagcctctaattatcgtatgcttgtcattcgtctatcctatcgtatgttggctaaatacgtctatatatatcatcgagtatatactgaatcttatagaggagtattcgtgttttctttatatcactactcacatcctcgccgctaccttgcatctagcgcgtctgcgtgctagagcgtgtgcgtgtgtatggtcgatcgacaagactagatactgttcgacatgaccgcaagtgtgagagaatatacctcacttactcttcttatccacgcgaatcaactgacatagattagagaggtgatagtcgagacgcgatagtgaatatattagcgactcaccggtgatcagtactgagaaactatatactaattantattactcccgacatgatacgataa

SEQ ID NO: 13857 - DNA, 182 bp, Glycine max
  Coding DNA Sequence Number=SeqID_4078
tcgtcgtaccctcttcagagattcaaaaggacttccggctttactcataaattcagagagtcaccatgtctggggaagaagctgctcctgctgttgttgttcctcctgctgctgagccagctgcaattccagaggacatggatctgttgactgcattggagctgactctaaggaaagcccgt

SEQ ID NO: 13858 - DNA, 487 bp, Glycine max
  misc_feature (28)..(28): n is a, c, g, or t
  misc_feature (54)..(54): n is a, c, g, or t
  misc_feature (278)..(278): n is a, c, g, or t
  misc_feature (296)..(296): n is a, c, g, or t
  misc_feature (298)..(298): n is a, c, g, or t
  misc_feature (318)..(318): n is a, c, g, or t
  misc_feature (416)..(416): n is a, c, g, or t
  Coding DNA Sequence Number=SeqID_4079
tacatcgtcagcatacttcgcactagtnacgattgataacttagtagtctactnttatatcaacaatctccacacctccattagtctgactatcccatcacctcatagtactaagatacaacattatcatatacagtcacgtcaatcactatctacgccaccagcatcacacccgtcactcaacagaactcctgcacaggtcagcgcacgcctctcctccgctacgacaggaaggagggtatggctacaacagaccgactgaacgaagagcaaggtgngtgctgagggagtagtgnanacagctagagacacgacacngtggtccccctcctaatcgcaatcgcactaccgcgcggactgcggccgcacgcaacaggcagcacactagctctgctcaccgcacagcttgagttgtngtactaggtcgttatgcgctcgcgtcgaacaacgacacactcgcaggactgtgtcacataccactatctag

SEQ ID NO: 13859 - DNA, 554 bp, Glycine max
  misc_feature (76)..(77): n is a, c, g, or t
  misc_feature (81)..(83): n is a, c, g, or t
  misc_feature (85)..(86): n is a, c, g, or t
  misc_feature (90)..(90): n is a, c, g, or t
  misc_feature (273)..(273): n is a, c, g, or t
  misc_feature (316)..(316): n is a, c, g, or t
  misc_feature (397)..(397): n is a, c, g, or t
  misc_feature (403)..(403): n is a, c, g, or t
  misc_feature (405)..(405): n is a, c, g, or t
  misc_feature (447)..(447): n is a, c, g, or t
  misc_feature (524)..(524): n is a, c, g, or t
  Coding DNA Sequence Number=SeqID_4080
ccgctgcacattacggtttgcttacgatgtagttcgcgatgtgattgttatcgtgagactatttatctccaattannccgnnnannaccnccactaacctatctatagtcggcgtcgaagagttgacgtttgtagatttagtaagatatcgatatgatgaaaaacatatgcgacctctgaccctgatacaattacttccgaacttcgctcaacgggcgtggatattgtatcgaaaccatctccacacagcctctgcgatactctccctcgacncgcacacaaactctcatcgccacggtccacgcccacgtatacntgacatacagagaattgtacattccttctctagctcgatcacatgtcaatgtgagccgcattcgtgcacggaactcttacncaccananacacgcgcagtacgaacactctgcagtactacggatatagcntacgtgtcatagccgcgcgatctcctgtggactcgtggtcatcgtaactgtcactccacacatcatgggcacactcncccgagacatacactcagacagcaggcgct

SEQ ID NO: 13860 - DNA, 510 bp, Glycine max
  Coding DNA Sequence Number=SeqID_4081
aaaattggatctccgttctccttatgacgccaagcaatatcctttcttgaatcaatgggatactgactacagagcaaacttcgatatgtaccaaaacgaaattgacaaaatcacttaccaattacaacgttctcaaagaggttttacaattatgggctcttggctctatcctgccttccaccaacgtgatttcttgatgttggacatctacaagagaaagcaagttataggtaaaattaaccaagaagaagtcgaaactttcaaggcaatcaactctaatattgctgaagatttgaataaaactttcaataccagtttctatgttcccaaggctggtcttttcagtggtttgggcttgaacgtctttgctcacttcttcaacttgcaatactctttcagaatcggattgttggtcgtccccgtccttactgactacgccattagatacttggatacttttgcttaccacaactccctggaatttttgagctggctcactgaatacagaac

SEQ ID NO: 13861 - DNA, 517 bp, Glycine max
  misc_feature (55)..(55): n is a, c, g, or t
  Coding DNA Sequence Number=SeqID_4082
atactcacgtggtcgggtagcttgactctgtagcacacgtcagtatcctcgattnttctcactctatactcttcctggaatttcaagcgtcgttctcgcggctacgggagtcgctatacccataatccatgttgatggagacgaagcgtgcaccatgacgtcttgctatggagatcctgccacagcgcattgtggttatcggctgtaccatgccgatcttaggttcaatgattgtgcgagtgtaaaacgcaagccaaaggataagcgatcacgttagttacgatactcatcttactagctcgccatatatcaccgtattctacctttccttctcggggggtgtacatagagaaggtagactttcgccttttttctttacgtagtacgagatgtatactcaagatagattgctactccgtggagatattccactgcgaggccgcggggtattctcatattgtatatgagacgcgtcctcctcatcccggtggtgatctccccacatttttactgtgtg

SEQ ID NO: 13862 - DNA, 515 bp, Glycine max
  misc_feature (150)..(150): n is a, c, g, or t
  misc_feature (329)..(329): n is a, c, g, or t
  misc_feature (331)..(331): n is a, c, g, or t
  misc_feature (335)..(335): n is a, c, g, or t
  misc_feature (387)..(387): n is a, c, g, or t
  misc_feature (417)..(417): n is a, c, g, or t
  misc_feature (479)..(479): n is a, c, g, or t
  misc_feature (486)..(489): n is a, c, g, or t
  Coding DNA Sequence Number=SeqID_4083
tgagagaccatcgtacacgctctgactgagagcgctacatgtgagcctctattttcttctacatctccattatatcacatatgcgtgaccttttcttgtggtgcaccactgctgaagagcatcgataagtatgtattgtctcacacatanacgcgactcgtcgtgcattagtgtctagattatgcgtgttgcttttcgctcgatcttgacgtgtgcgctcgatgtctctctcctctgtgtatactacgatagtcgttgttgcgctcgctgcgtcttctcgcccgaccttcacacctatatcactccgtgagaagatgagtcagaccctntntctntctcctgcgcggcgctcaatgacaattatacaaatgaaagaaaagaaggatngctattgttgtagattcacatctttagttnctatcttgaggggggggggggtctctctagtttatctactatatgtagcgaggggcgggcgnggggggnnnngggccactacatgatctcatgccata

SEQ ID NO: 13863 - DNA, 556 bp, Glycine max
  Coding DNA Sequence Number=SeqID_4084
gccgctgaaacagattcgccgatggcgtattctctcctccagagctacaacttccctgtcggaatccttccaaaaggagtcgtcgcttatgatttagatacatcgacaggcaaattccacgcctatttcaaagactcctgcagcttctcgctcgtgggttcttaccagctgaactacaaatcgacgatcagcggttacatctccgagaacaagctcacgaagctgactggtatcaaggtgaaagttctgttcttgtggctcaacatcgtcgaggtcatcaggaacggagacgagatggagttttccgttgggatcacgtcggcgaatttcgggatcaatgagttcttggcgtcgcctcagtgtggctgtggctttgagtgcaaggaatcgaagaaagagacgtatgacacaagcttaccttttgtttcttcttcttgaaaaggtacttttgatgagtgcccttttgaaaagatcgtgtctttaaatatatatgtttcactctcttgtccaataagatcatagtttctgaatgtatatctcttattgccattggtcg

SEQ ID NO: 13864 - DNA, 515 bp, Glycine max
  misc_feature (115)..(115): n is a, c, g, or t
  misc_feature (153)..(153): n is a, c, g, or t
  misc_feature (323)..(323): n is a, c, g, or t
  misc_feature (364)..(364): n is a, c, g, or t
  misc_feature (385)..(385): n is a, c, g, or t
  misc_feature (433)..(433): n is a, c, g, or t
  misc_feature (479)..(479): n is a, c, g, or t
  Coding DNA Sequence Number=SeqID_4085
gcaagagcaagtacagcagcgttaagacgctcatattagcgcccctagtctatacagtcctctctatattgcacactctccgagagcgtgtgatgctcaataatgattgatgtcngacatctaagtctaactgtactctcacctcactgtatnctcactagctacgtcctctccgctcgggcgcgctctgacctgtcctcacacgtcacgctcaatcgcggcccgcgcatttatatacagtagctatcttctcgtctctccaatgctccctatgtaccaaaccgtgagcgtacacattactatttaataacgatattctccgnacagctctaatacatctcgtgcttactctgtaggttggtgnccacagtaccctttctcctanagagaatgtcttccacgtcactgcgtgtccttcagagaacagatatanaataccctagaatgaaggacagaggagggacacccgctctaactcncgcctcacggatacacgtcgagagccgcgtgagact

SEQ ID NO: 13865 - DNA, 472 bp, Glycine max
  misc_feature (115)..(115): n is a, c, g, or t
  misc_feature (128)..(128): n is a, c, g, or t
  misc_feature (283)..(286): n is a, c, g, or t
  misc_feature (298)..(298): n is a, c, g, or t
  misc_feature (309)..(309): n is a, c, g, or t
  misc_feature (333)..(333): n is a, c, g, or t
  misc_feature (406)..(406): n is a, c, g, or t
  Coding DNA Sequence Number=SeqID_4086
atacttgattatacatccaccacccgtttgtggtaacagcgcccacggagtagcgtaggatgagagagaaggggaaacaaacattccgcagtcgcgtcgcgctgaatcgtccganctttgtgtgttgnttgtgtgttgttgtatatattatatatctctctcttgattttatatctatagtactacttatttattcacctgtctctccatacctagcatatacatctctcgcacacacgcagagtcggcgtcaacaccggccgtgggctcgtgtgtggtatannnnttcctatcgtcngggcttgaccnctattcgctgtgtatctgtgtttntagatgagagaggagccgcaaccacacgaaccaccagcgcgacggccagctgaaacaatatcaaccgccgtanaaacacacaagcaagcacccaacaatcagcgagatacaagcgacagatcacgaactagccgcatac

SEQ ID NO: 13866 - DNA, 521 bp, Glycine max
  misc_feature (58)..(58): n is a, c, g, or t
  Coding DNA Sequence Number=SeqID_4087
ggctttgcgtaatccgccagtggcagaagggggaacatcctaatggaaaaatcgaggncgtgggaatactgtacagtgccattaagaggcgggaagatattactaatacagcaacgtgggtggatctggctcgtattcttcagtttgctattttgggcttgaggttggcggtatcgataaacgacattttttcccccctcctgaaaaataagaatgaatattcatagactactaacttttcattccaacactacgcaactatgccaactgttttaccattcaactgttgtatagtcagtccttattatctacaagttgaaccggtgaagatactgaaatgcgatgtaatcataaatttataataatctcctcaattaatccactcataagcaggatctctattttattgacaactagttcagcctcatctgcagaaaatcctctcctccaacccttctcccacataccatttatctctccattgcacttcatgtatttctccatcattgcaaagacatcat

SEQ ID NO: 13867 - DNA, 564 bp, Glycine max
  misc_feature (232)..(232): n is a, c, g, or t
  misc_feature (250)..(250): n is a, c, g, or t
  misc_feature (349)..(349): n is a, c, g, or t
  misc_feature (441)..(441): n is a, c, g, or t
  misc_feature (455)..(455): n is a, c, g, or t
  Coding DNA Sequence Number=SeqID_4088
gtgagagatactatgctatccatttatatgtcggtacacattcttttcttatgattatcgtagctcctcgtctccgttacgctgtctcgcgatacgtatataatatacacatctggaatataattagattagagaagaggaggaaggaataagaagatagaactacttattatgagagacgatctgtcgaatagaagtagagacgcagagagaccagacaggagtcgtaatnttatatgtctgaaagagntcgatgcaggtgagagatggatgtagtcacagtctcgtgcgtctcgatctcgccgacaagtctaagatagaccgacaaagagtgcgtgtatcgaagagnagtggtgtacatccccatagaatatcggttggagagagatgtgattatgtagtagatataaatacgaatcgcaacaatataatgtgactatngcgtatattaggtnggaggagggcgtgggagaatgaggagagagagagaggggtgtgttcttttcttcctgtggtgtgacattcgataactatgaatctcatatcgacagagaatcttttcaa

SEQ ID NO: 13868 - DNA, 524 bp, Glycine max
  misc_feature (31)..(31): n is a, c, g, or t
  misc_feature (78)..(78): n is a, c, g, or t
  misc_feature (98)..(98): n is a, c, g, or t
  misc_feature (155)..(155): n is a, c, g, or t
  misc_feature (190)..(190): n is a, c, g, or t
  misc_feature (261)..(261): n is a, c, g, or t
  misc_feature (463)..(463): n is a, c, g, or t
  Coding DNA Sequence Number=SeqID_4089
accgcgcctcggtcgtgaggatagcgataancagactccaatattcaccgaattcatcagtcagatttccacacattncgaccgtatcgagacgatgnaagccgtgttgggatgattacacacgagtcttcctacatcacgaacgagaacatcgnatgacactgaaatgaatatcataacatagatactnatctctcatatattcgctctccgtctttgcgcccgttgatttataaacaatatattgtgtatatatctatntcgttgcaattatatcaatattattgttagttagagccgaagtggttgtgtgtagggagagggaggaggaacaatgttaggctcacataaaagagatacccggcgcgagcttttgagtgctcgctggtgatagggcgagagaattcgtgcacgatagatgacccaacatctctgtatggcatttcgtatgtcgatgttttancgagggcaattggggatgcgtgtaaacactgtcgtcgaccccgcacatcgtgactatatat

SEQ ID NO: 13869 - DNA, 476 bp, Glycine max
  misc_feature (192)..(192): n is a, c, g, or t
  misc_feature (201)..(201): n is a, c, g, or t
  misc_feature (230)..(230): n is a, c, g, or t
  misc_feature (245)..(246): n is a, c, g, or t
  misc_feature (280)..(280): n is a, c, g, or t
  Coding DNA Sequence Number=SeqID_4090
gatccaaagtcgcatcttttgcttcactctacgcagatcgcagcaaaccagagattgaactccgacgatgcctcccgtcgctcctcgatccggcgatgccatattcgccaacgtcgaacgcgtcaatgcggagctgtttactttgacgtatggcgcaattgtgcgtcaattgctcacggatctggaagaggntgaggaggntaacgagcagcttgatcaaatggggtacnatattgaaatccganntgatgatgagtttttagctaagtctaatgtctcnagatggcacgatttcagagagactactgatggtattggcaagggtggttttaaaatggtccttgggggtactgcatctgggaccattggggatgctgatgggaactggtgtaaaattggtttgggaggaaaaccatgggaaaatttggttgacttcctgaaacgtgccaggtttggactattggaactccttaggg

SEQ ID NO: 13870 - DNA, 455 bp, Glycine max
  Coding DNA Sequence Number=SeqID_4091
agcataagtttccacctagacgaccgccgtagtcccctttcctccagagcgtatgagatgcctctcgtcccctgaaacgaatatgcccgagtctgcaagaaacctaaaaccaatgtccattatccctccggcggtaagcctcgccccgtatatcaacgagctgtgaaatgctaccacaggaaccttatgcagctcttgattcctatgttgcttgggcattagagctccctttaattacgcgaaacagcctctcaggaccctataatccgacaagaatggaagcgcccacacaggtaacaaagtggatgctaaccacaggtcaagggcacgacatgcgaagctatgtcacataacttagtgcttttagagaggatgaccgccttgatgaagctgaagagttttggacgagttatttatggcagacatggaaagcttgcctcggaaatcttttgaaa

SEQ ID NO: 13871 - DNA, 494 bp, Glycine max
  misc_feature (244)..(245): n is a, c, g, or t
  misc_feature (319)..(319): n is a, c, g, or t
  Coding DNA Sequence Number=SeqID_4092
aatacacgtaggctatcactgcggagattacctggcaccggctgcaagaataatgtgcacaacaagtagatgtcgtagagtgtataagggtcctgacaagccatggtgcgacgctagatgtcgactggccatgtttctgcaacgacacgtgatttttgacgtatacaatgtgttacactgttatttgagttgcgacgtgttgttgttgtacacatattccctccaacatatgatcgtcttcggnncatagagatagatagcttaggcgcgtgggtggtgcagcgacatcgatggtgttgtgtctcggacaccacacgtncggccactatgagcacacaaagagacgcggctgcatagacaggaaagagtatgtatagcggcaagatgatgtctgtgtgagtgagaggggggagaccctacaacgttaagacttggatcttacggacgggtgaggtagacgccccggctcagctccccatttcctggttgtgtgt

SEQ ID NO: 13872 - DNA, 365 bp, Glycine max
  Coding DNA Sequence Number=SeqID_4093
cccaatcaagcccagtcagacagatttgcaggaagatgagagagataatggttaacccggcacctgcctctgtttttaaagaattggtgggcaagttcatccctgaaatgattggaaaggagatttagaaggccccctttagcatatatcctttccagaatgggtttttttgtaaagttaagatttttaaagctcccaagtttgatttaggaaaactgatgggggttcatggtgattaccccaaaaatgttggtgccaaggtggatagaccccctgatgaacccttggctgaggaagccacttaagtagttggggcttgatccgaaaaaaaatgcctttttgtttgtttaaaattcctgttgctt

SEQ ID NO: 13873 - DNA, 288 bp, Glycine max
  Coding DNA Sequence Number=SeqID_4094
ggttcttgatcatcactttattaagagcttggactctactatataggtcctgggggtggtcataacataaatgatcttttcaccattctcaataaactttaaagcactaacacaaccatccctgtatttatccatgctatcacttaaaaaggccgcagatacccatatgcaaaaaaggcatttttcaaataccattgagttaccaaattttatccaccaactggtaagcaattcaaatacaatgttttccactcagtataatacaacatactttgcttaatcatttta

SEQ ID NO: 13874 - DNA, 579 bp, Glycine max
  misc_feature (56)..(56): n is a, c, g, or t
  misc_feature (173)..(173): n is a, c, g, or t
  misc_feature (531)..(531): n is a, c, g, or t
  Coding DNA Sequence Number=SeqID_4095
ggaagaacattcacactcaactagtagcgcggtagtgagggagtgggagcgcagcngcaacaccaacagaaccacgtacgaactgcgagcgtactggtccgagccatagggacctctgacagcacggacacacctgaggaacgacccgcagaaggaccagagacgcaggagcncggagccaccgccgcgagcaacactgtgcgacgtgcgagtgcgtggcgagtggacgtggtggtgacggagcgcctgcgccggccaccggcacgcggctagcctggcccgcgctccgccaacaccgcctcggtgccaacagcagtagaacggctgcggcgccggaagaggcatgggtgcggacaggggcacggcccgggaggtaggggaggagcacggcgtggtgggacggcggagcgcagcggtatgacatgaggggtgagagagacgcgagtactcgtgcgtgagtgcagcctgagcgccgccgaggcgcttgcttctgtgctgtgatgttgtgaccagcacaccgaagtagtcacngcgcattgaaaggcatcacagataaatacgcaggagagcaagcctatg

SEQ ID NO: 13875 - DNA, 556 bp, Glycine max
  misc_feature (27)..(27): n is a, c, g, or t
  misc_feature (46)..(46): n is a, c, g, or t
  misc_feature (160)..(160): n is a, c, g, or t
  misc_feature (208)..(208): n is a, c, g, or t
  misc_feature (240)..(240): n is a, c, g, or t
  misc_feature (391)..(391): n is a, c, g, or t
  misc_feature (395)..(395): n is a, c, g, or t
  misc_feature (499)..(499): n is a, c, g, or t
  Coding DNA Sequence Number=SeqID_4096
acttctatttagatcgtacaccatctnacttgtctcactatacatntatatataatgcgtactcgcatactcatcttctgattttctctctcctacacaacttatatatatatatattgttcctgcttctgactcttctgatcatgtatatgcgctgctncaccgcgcgcgctcctcaccgctcgccgaccggacactctgcgcgcgntcactcgatgcgctgtgcttttctcctcacancgcatcatgagcatgtagttgtatactacatgtatatctctctatatcctcgtcacgtctcgatgttattatacacactctcgagtcgcgctcggcacctcttatataccctctactactcctcataagctcgcgcgcctatgtgactatnatancgacattgacacgaccttgtatgtctactgctactcactgtcgcggccgtcatcatatatagctacaaagtagaggttgtcctgtcgttcactctcatatcttngtcactcttctatctctactactatgtcttttgggcgtacgacacatcataacatat

SEQ ID NO: 13876 - DNA, 189 bp, Glycine max
  Coding DNA Sequence Number=SeqID_4097
ttttgcagcggctggaggtcgatctgagaagaagagaaaacaatggcagcaccacaagtgaagactggtttgttcgttggtctgaacaaaggacacgttgtcaccagacgcgagttggctcctcgtcctaactctcgcaaagggaaaacgagcaagaggacgttgttcatcaggtcactgatcagagaa

SEQ ID NO: 13877 - DNA, 419 bp, Glycine max
  misc_feature (269)..(269): n is a, c, g, or t
  misc_feature (271)..(272): n is a, c, g, or t
  misc_feature (349)..(349): n is a, c, g, or t
  misc_feature (354)..(354): n is a, c, g, or t
  misc_feature (361)..(361): n is a, c, g, or t
  misc_feature (390)..(390): n is a, c, g, or t
  misc_feature (392)..(392): n is a, c, g, or t
  Coding DNA Sequence Number=SeqID_4098
gatatctctaaactcagaccatttgatggaatgaaaacaccttgttctctaaacgtgccttagatgtgtgtgtgccaatatccctcggtcacactcacatctatttaatgacacattcaaactcaacactacacacaaacactcactcttggattttataggcacatgtttatctttttcagtgttttttttcctttatttcacttttgaaatttttccatggagttcaaatatcgtgatggccaaatccaaaggacaccctcaccatngnnaccccctcttccctccaacacctatgtcaccaatcgcccattacaagggggagtttgcatcaggtggtttttcctangcaangttttgncggcctaaaagtttttctaaggggccatngncggtcaatgttgacaaagagttccaat

SEQ ID NO: 13878 - DNA, 520 bp, Glycine max
  misc_feature (494)..(494): n is a, c, g, or t
  Coding DNA Sequence Number=SeqID_4099
gggacgaccacacgaggatccacaaccgcgctcgcggcatgtgatatggaggaacggctccatgcgcaatcctcatgctcgccggcgatctacagctcgctacccactgagccattttcacctacttcagctactcacatgacacactaatgctcactcaacatgcaggctgatccgagtcgcaacgagacatggcgacggcagaccatacttactgactgcccgacactaatcaacacgcatttaatcgatcgacgaagcaaatgatcgagaaggaacgacaaatagaaacatagcaacaagagataaacgaccatgagaatctacactctatacatcgtgaatagttactatcctagcgtgataccgtcctggtgcttcccgcctatttacgcgacgccgaccaccttatctatacaaacagatacgcacatcaccatcctctcgcgccccgtctgcgctctcgccactctatctcttccctcgctgtctgnctgtctactctgcctactactatgat

SEQ ID NO: 13879 - DNA, 220 bp, Glycine max
  Coding DNA Sequence Number=SeqID_4100
tctcgcttgagagcatcgaggcatactggtagttagttatgtattacaatctgtaggatggcagctatgtcctaggactgtatatctgattgtagattgtgtaattgcgcagcgtgaagttatttgtagtttgtggacagagaatacactctgtaggagacttttgtctctgggacagcaagtgtattgctgtatagcgtgtgattccagggctctatat

SEQ ID NO: 13880 - DNA, 567 bp, Glycine max
  misc_feature (64)..(64): n is a, c, g, or t
  misc_feature (109)..(109): n is a, c, g, or t
  misc_feature (132)..(132): n is a, c, g, or t
  misc_feature (147)..(147): n is a, c, g, or t
  misc_feature (205)..(205): n is a, c, g, or t
  misc_feature (214)..(214): n is a, c, g, or t
  misc_feature (276)..(277): n is a, c, g, or t
  misc_feature (284)..(284): n is a, c, g, or t
  misc_feature (291)..(291): n is a, c, g, or t
  misc_feature (325)..(325): n is a, c, g, or t
  misc_feature (340)..(340): n is a, c, g, or t
  misc_feature (354)..(354): n is a, c, g, or t
  misc_feature (366)..(366): n is a, c, g, or t
  misc_feature (400)..(400): n is a, c, g, or t
  misc_feature (443)..(443): n is a, c, g, or t
  misc_feature (453)..(453): n is a, c, g, or t
  misc_feature (465)..(466): n is a, c, g, or t
  misc_feature (471)..(471): n is a, c, g, or t
  misc_feature (478)..(478): n is a, c, g, or t
  misc_feature (487)..(487): n is a, c, g, or t
  misc_feature (509)..(509): n is a, c, g, or t
  misc_feature (512)..(512): n is a, c, g, or t
  misc_feature (515)..(515): n is a, c, g, or t
  misc_feature (517)..(517): n is a, c, g, or t
  misc_feature (531)..(531): n is a, c, g, or t
  misc_feature (539)..(539): n is a, c, g, or t
  misc_feature (541)..(541): n is a, c, g, or t
  Coding DNA Sequence Number=SeqID_4101
tgcacgtctcactactatcgagagctacgactcgcgtacactcgcacgacatgtgcgctcactnagtatcgctgctgatcgtacgtcgtcattgctcccacgtcgcatnaccttagtcgtcatcagcactcntgaccagctcgtagntataaaagtaagtgatcagctacgatccaatccacgtgacgctgcacgcgatgcgatncaagagatnagatgcgagtgtgatcgagatgtgcacatgctgactcgacctcacacacaactctacgcatnnacacagncacatcnacgtcatatctcgactgtgattgtagctctaacncactctgaatagcgnacacatagcgtcgnctatactacccngtgttagccctgacctacatcgcaaagtgcgctnacgtagcaatcgatctctatactgtagagtatgtacagcgcgntatcgcgtanagcgatgtatcnntcaancacacancatgtcagntctagcgtatcgagacacatancanacnanatgctacatcaaangcaatacncnagtactagcgtacgtcaattcgctca

SEQ ID NO: 13881 - DNA, 274 bp, Glycine max
  Coding DNA Sequence Number=SeqID_4102
taccctttttcactggatcctccaacgagttagtggagtggtttgatggacgaggggcagctataatcatagaccttttcaatgtctcatggaaatttgcaccttctaccatattctttgacgaacttgatgccagtggaggcgtacgtggaagaagttggtatgatgaacgtgacccgacgttcaatcactcgctgactaaaatggatggatttgaatccaagatgagagtggctggcatggcagcacctaacctgacagaagccttgaatac

SEQ ID NO: 13882 - DNA, 531 bp, Glycine max
  Coding DNA Sequence Number=SeqID_4103
taatccattggcgtgtagtggtaatggaacatgcgcagattataacatgtgtacatgtaagagcggttatggtggattaaaatgcgaacatgcaatatgtaatggattatatgcgaatgattctatggtatgtagtggtaaaggtaaatgtgtattaccaaacacatgtatttgcaatcaaggatacagtggtcaattctgtgatactcctatttgttataataaagatggttcataatgcatgtaattatccaaacggaacgtgtatagcaccaaatcaatgtcaatgtgcatcagttaacaatcaagtattatacacaggagcagaatgtcaacttcctgtatgctatggtaaaaacgcaagtgatccaaatgtatgcagtacgtatggttcatgcgaatctccaaataattgtgtatgtaaaccaggctactctggattagaatgtcaattcatcacttgcttcggaaagagctcatcttccgaatcagtatgtaatgcaagaggacaatgtacgtctcctaatcaat

SEQ ID NO: 13883 - DNA, 568 bp, Glycine max
  misc_feature (60)..(60): n is a, c, g, or t
  Coding DNA Sequence Number=SeqID_4104
gcatgagcgtacacgagatctcgtcgtgggtgcgagtatacgcgcgtctagaacatgcangcatccatgtcccgcatacacaataccataatctgctcacacctcagcgtcgacgcgcaactcatgacggagagaccgtgcggtcgtacgacgaccgaggcgagcacacaatccgcatatacaacacgcgggtagagatgcaacgacgccacaaccaaacctgagagcggcagcgggtagtgcatatatacatagtgggtcgcgtctcgtcaacatcgctatacattctacaagtacgcaacacgcatgcacaggtctcaaaaataaccactagagcgagactcgtgtagatatacattcatagtgtcgcactgagcggtcgcgaacgtcggtcaccacttatccacacgcctgcgtcgtgctcttgtctctaatcaccacgtcgctcatatcgcgtataatgaggatataagaatagctgtataattattgtccactattattgtggataagatgttattattataggagacacagattaaacacgcaactggcgactgtagtgtga

SEQ ID NO: 13884 - DNA, 480 bp, Glycine max
  Coding DNA Sequence Number=SeqID_4105
atacgcgcatgggacgacatctgtaggggtgtatggtatggcaggcgtggtgacacgtcttcattgacagcgatacgaggaagacgcgagccagctatcactgataataagggtagcttgtgtgatacgatgggatgagggtctgtctctctgggcctacgaatgcatcaagctcatgatcaagcactagagaaatcatggcagtgaccctcttgtgtctagtcctgcgacgtggtgtatgtgccggcgcagccaaggaaaacatcgtcttctcgctccgatcatccagcgtgtgataatacagacacacggtgaagtcaatcgatcagagctctggcgtgttgtacgaagctgtggaaagtgttatacaagggcgcctataggttcgtccggttggccgcgaggtctcctagccgagaataagaaggagcgacttctctgcggctggtgcctaggaagggcagcgcactactatattaa

SEQ ID NO: 13885 - DNA, 535 bp, Glycine max
  misc_feature (26)..(26): n is a, c, g, or t
  misc_feature (71)..(71): n is a, c, g, or t
  misc_feature (185)..(185): n is a, c, g, or t
  misc_feature (209)..(209): n is a, c, g, or t
  misc_feature (212)..(212): n is a, c, g, or t
  misc_feature (246)..(246): n is a, c, g, or t
  misc_feature (259)..(259): n is a, c, g, or t
  misc_feature (370)..(370): n is a, c, g, or t
  misc_feature (372)..(372): n is a, c, g, or t
  misc_feature (436)..(436): n is a, c, g, or t
  misc_feature (446)..(446): n is a, c, g, or t
  misc_feature (476)..(476): n is a, c, g, or t
  misc_feature (498)..(498): n is a, c, g, or t
  Coding DNA Sequence Number=SeqID_4106
aggactcgctagtcgcgctgcgatanacgcactagctatgtcagagatgatagatatgttatcattcagantgatgagccatactcaccctcgtatgatatagacatatagaacttgagagtcatcttatatgagcgtcacatatgatatccatagtgacacgacataccatatagaccgacaanttatcttactaacacacatgatancgnaagactatcgtagcgataaacatgagcgatcagncgtgcgactcacngagtagcgatagtgtgcccatactatcgttagcggacatcgtgtcatcaatcaatgtgggtctcgagtgtgaggaagacgatgatgttataagcatactagatgatcgacncncgacgtacgtgtcaagtgatgcgcagtacgcgacaacagcgacgacgcttaccacatcctcgcnaaaccgtgcnctcgatgtgtcgaggcagctagactgtganctcataatctacgctggctccngatgcgtgtacgactcgtgcagagtgacttactcgta

SEQ ID NO: 13886 - DNA, 552 bp, Glycine max
  Coding DNA Sequence Number=SeqID_4107
ttggtgtacttcgatgcaagcctctgcgcgcagccgcacctctgcatgactgaataccgtgcttaacccggtgttccgcaaggtcgcataggctacaccacttatataacactgatctgctaaagacattccacagacgacacactacgtatcgattaattcttctacgactagttacgctctctaagtacacaaggcagacccaaccacataacataaatatgttatcatataatggagtacatgaatgagagaggatgcactgtccacacaatacagcaccgcaccacgacgacaccacccacatccaccgttcacgtggaaaaccaactcacgcagaattcgataaagtataaagtagaataaaccactctgttaacgagacgcgctattctataaagtcactctcatctacatatgtactattctctatatatattcgacactctcatacataattataacatactatcttgtgttcactatatgagagttatacaacagatgatcaaagagtcacagacctagcgcatattcgtgtatgctatcact

SEQ ID NO: 13887 - DNA, 376 bp, Glycine max
  Coding DNA Sequence Number=SeqID_4108
ccgccaatttacattgtccaaacctcccccccacatattccccaccctcccctcataggccgtcacctacacatacacacccctccctccaccccccccactgctcccctctcgccacccgcaacactcaacacccactcccaccaccaccatataacaaccactacaaggcaacaccacactcccacgcacccccgaacccccccacacatccattatatagatccctaatctctctttcccctctttccacaccaccatttccaccctaccattactatcatcacccccagcccctatcttgctttcatacctacacacaaccaaataacacagacaccacccacaccagaaaaactcacaacaaccaacaggc

SEQ ID NO: 13888 - DNA, 132 bp, Glycine max
  Coding DNA Sequence Number=SeqID_4109
aaagttttgcagaggctcttcatcttaagggaatcccatatgttatattttggaagaataccttctcttgttatgctgcctgccattttcgtcaagcatttctttcagtagtacaaagaaagtccagcatga

SEQ ID NO: 13889 - DNA, 559 bp, Glycine max
  misc_feature (45)..(49): n is a, c, g, or t
  misc_feature (126)..(127): n is a, c, g, or t
  misc_feature (188)..(188): n is a, c, g, or t
  misc_feature (190)..(191): n is a, c, g, or t
  misc_feature (194)..(194): n is a, c, g, or t
  misc_feature (197)..(197): n is a, c, g, or t
  misc_feature (255)..(255): n is a, c, g, or t
  misc_feature (324)..(324): n is a, c, g, or t
  misc_feature (326)..(326): n is a, c, g, or t
  misc_feature (329)..(334): n is a, c, g, or t
  misc_feature (356)..(356): n is a, c, g, or t
  misc_feature (424)..(424): n is a, c, g, or t
  misc_feature (433)..(433): n is a, c, g, or t
  misc_feature (436)..(436): n is a, c, g, or t
  misc_feature (485)..(485): n is a, c, g, or t
  misc_feature (488)..(488): n is a, c, g, or t
  misc_feature (492)..(492): n is a, c, g, or t
  misc_feature (525)..(525): n is a, c, g, or t
  Coding DNA Sequence Number=SeqID_4110
ttgacgtatcggcacgcgaacgctgctcgtgacaattctctgcgnnnnntcatatgtgttactccagcgcgcgactccatcgacctcatcgaactacgcggcgagcgtggacgcgcgcggcgcggnntctgtgattatgaatctcgatagatgtgtcgctagtccggtacgtgtgctgagcggcgtcncnngcntgntcgtgagtgtatagtgtagtagcgagtagatagtgtgtaagattagagagtggcatgnagagaacgtacaggtgcgttgtgttttaagtatccgagacatggtgcgcgcacgcgtcgatcgatgatntnttnnnnnntcaactatggtattttcatccnactacatcgtatcgctagaacgtcgtatttgcgtcatcttcaggcttcatatacactcagagagactnctcagtcgncgnaacggtgtaacgtcgatgtatagtacgatgatgagagtgatgctgtgantantgtntacattctcagcagaacgtgagactacgttganacgcagtaacagtgactagagatcgacgacgcga

SEQ ID NO: 13890 - DNA, 515 bp, Glycine max
  Coding DNA Sequence Number=SeqID_4111
aatcgaaaaaccatcgttccgcgctgacccctgtcgttaactgctacactttgcttcccccactaggtagctaagctgcatctggatccatcgatccatcctcccatggcggccgtggagctcgccgccgggctcttgcagagcaccgcgctcatggcgacggtggcggggtacgcgacgtaccggacggggccatagtcctggaaaacgcaggccatgcacttcgcgaactgcctcctcctcgtgggcgagtgcgagaactgctcgccgagcgtggtgggggagcccgcgtgctactggaacatggaaagaaaagaggtgatcgactgcgcaccccgccacacactggaaccgggccaacaagaacatcaagatcggggagatgaacctctcctgcatgaagaacctcaagcgcaagcatgcgcgctgcccgctacgataccttagggtgcaccttcctactacgaagataatctcgcctctcgggtggggagagccatctcccaaaaaggtgg

SEQ ID NO: 13891 - DNA, 330 bp, Glycine max
  misc_feature (296)..(296): n is a, c, g, or t
  Coding DNA Sequence Number=SeqID_4112
tactggtaaagtaatagcattctactaagtctatcttcttttaaatcaatctagaacatcagttagataagttaaagcgtaaattttgagttgttaatatgatatgtatgtgtttttatgaccagtttaggagatgcttttatgtgtctctataactaactatttgtacaagtatctcttaaatttcaattatcttttttacatgttatatttcattggaaaaatggatcggttctcatttcaccttccatggttttgtgtgggatatggtttaatatctgcatgcagacccagantctagggtcctctctatttgtgtagctatctggg

SEQ ID NO: 13892 - DNA, 573 bp, Glycine max
  misc_feature (28)..(28): n is a, c, g, or t
  misc_feature (89)..(89): n is a, c, g, or t
  misc_feature (191)..(191): n is a, c, g, or t
  misc_feature (261)..(261): n is a, c, g, or t
  misc_feature (393)..(393): n is a, c, g, or t
  misc_feature (426)..(426): n is a, c, g, or t
  misc_feature (460)..(460): n is a, c, g, or t
  misc_feature (488)..(488): n is a, c, g, or t
  misc_feature (491)..(491): n is a, c, g, or t
  misc_feature (528)..(528): n is a, c, g, or t
  Coding DNA Sequence Number=SeqID_4113
agagactgagtgtagcacgccaactcancggtgtcgtgtataatagcgactatgcacgtatggtgacttgtcgtgatctgagagtcgtngccgaatagattgtatgcgctctcgatctgtacattagctatgcgcctatcctcgacggcattactctgcgcacgcctagtcgcgactacgttagcatctcnttacggcccgacgctcgcacttctacaatctcttctgtttgcgccatgtgatgcgcccacgcttcatcgnatataggttgtgagtcatcaccatgcgcgaactaacatcggagactatgtatcgcagatgacgtactcgtgccggcgcaatacgcgagcacacatacccgcacgcgccgatcaagctgatgcgagaccttantcgctccggctacacctctcactctcaggaacncgatccgcgcgaatcatgtccctcgtactgtcgnagtcgtacgatgtccgtgtcgcgaccgngcnagtctcgtattctgctacaacgcgccagcgacgcgcntagtctaatacactgaatcagagatgcatacgtgtgctgccctga

SEQ ID NO: 13893 - DNA, 399 bp, Glycine max
  Coding DNA Sequence Number=SeqID_4114
gcaacgcagcagtgacattaagacagtcattttatgttgtagtctattgtgacaacataagacctacctcttgtactaatgatgttaatcctgtctgtgccattagttgtcaaaacggtgtatgccagaaaactgtaaataacatttgtcttgcctgtgccgatactaatatcttgtcttatagtttaggaaggtgcgaggaggaaaatatctcttgtcctagcatcgattttgcaactgatacaacaacttgcaactcattctatgatccagtttgtgcttatcctagtggttgtaccagtaagtcttgtgccaccmctgttactaatagttgtggagcttgctatactactagagcaagctatttcacacttgggccttgctaaatgtctctttgaa

SEQ ID NO: 13894 - DNA, 349 bp, Glycine max
  misc_feature (208)..(208): n is a, c, g, or t
  misc_feature (288)..(288): n is a, c, g, or t
  misc_feature (302)..(303): n is a, c, g, or t
  Coding DNA Sequence Number=SeqID_4115
ttcagttcttcatttcccattggttgcctcctcagttttttgggcaaaccccagttctcggggtcatcggatgactctggtttccgctaagttttgccaataaaactttgggtttaggcgatcatggcggcatataaccatctggtttatgcacccatggcagcaaataaacttctgctttatgtgaccacgccagcagctgctatancgcccgtccccattcgcggttagtcaatgccatcttcactcattttgatgtgcaaaatgaaagagtttggatcgttagtntgctatgtgtgatnntgatgaggaagaatttggggtggctttggtggaacttgtacacaca

SEQ ID NO: 13895 - DNA, 502 bp, Glycine max
  misc_feature (95)..(95): n is a, c, g, or t
  misc_feature (173)..(173): n is a, c, g, or t
  misc_feature (198)..(198): n is a, c, g, or t
  misc_feature (258)..(258): n is a, c, g, or t
  misc_feature (260)..(260): n is a, c, g, or t
  misc_feature (262)..(262): n is a, c, g, or t
  misc_feature (283)..(283): n is a, c, g, or t
  misc_feature (361)..(361): n is a, c, g, or t
  Coding DNA Sequence Number=SeqID_4116
gagcagcgctctcggactatctctcgctccacgtgcattcactgctcgcgcacacctacacctatctgcgtcaaggtacggcgctgtgcatatgntgtgtgttgatctcactgccactcgacgacgtcggcgtgcgatcagataatacaactaattatactcactcacataanagcacgtaggtaaccgctgtgcatngagttatcatatcagagaatataaaccatctagcccgccatctctccgcacacagaacantnantattatacatatcatagcccnatcacacgcaccacgacagctggtatcgcgcggcgtgtctcagcgtggcgcgtgcctagcctgcacacggctgacacncacctacacacgacacatcctacagtaggatgacgtcgtgtgacatacgtgtgtcttgtgagagtgatgaggagcacatcgatctcgtcgatagacaccacacagtgagaacacggcatctctcatcaacaggcgaactag

SEQ ID NO: 13896 - DNA, 173 bp, Glycine max
  Coding DNA Sequence Number=SeqID_4117
gggaccaatttctccagtggtgcaagctttgcaacagggggttccacgatcatcccccaacaaacccttagattcagtcctttctcccttggaattcagtactggcatttcctctgttttacacccactccaaagttcattaaggcccaagggggagtatttgcagcactgat

SEQ ID NO: 13897 - DNA, 451 bp, Glycine max
  misc_feature (289)..(289): n is a, c, g, or t
  Coding DNA Sequence Number=SeqID_4118
tgtgctttggtgattcgagtatttttcctctcgggttacctccgtaggccccccccccaaaattccccagcaaattttgcacttgcaattgaaacaacttatcaaaagcatgcttaggaaaaacccagaacataggccaactgcagctgaattgttaaggcatccgcttttacagccttatgttcttcgctgtcataatgcatcatctaatgttcttccagtatatcccttagttaatccaaaggataaaacaagaagatctaataaatctagtggtggcaaggaccantaaggacaaagaagctagtttggtaaatcgtttggagcggattcatccaattgagggaaatggagatatacagataagcaatcttcctaatgatgcggtaacaatctcaaccagtgcagaagacaatctagagaccaggatggctgatcttaccagctacat

SEQ ID NO: 13898 - DNA, 550 bp, Glycine max
  misc_feature (124)..(124): n is a, c, g, or t
  misc_feature (289)..(289): n is a, c, g, or t
  misc_feature (342)..(342): n is a, c, g, or t
  misc_feature (393)..(395): n is a, c, g, or t
  misc_feature (430)..(430): n is a, c, g, or t
  misc_feature (476)..(476): n is a, c, g, or t
  misc_feature (517)..(517): n is a, c, g, or t
  Coding DNA Sequence Number=SeqID_4119
gatattaccgtgtgtagctgatgaagggcgcagttgagtgcagactggcgtgatagacttatacaccgagcaaaactagcacacgatcacggatccagagtactcatgatatcaaccattacanagaagcggtcgctgtcgtatcgcacagtcatgttcggtctcatcatgtaccatccgaccacactactatacatctactcacatgatgagtgtatgggtaaatataagtgattctacagatacaatgcatgacgtgatatgtactgatgtgaagcgcacggatgantgatgcgcgtatcgcgtgtctctcagtatatcgactcgacacgtgtgaggcgntgcgtgaccatcgaagtcgcactctcacactgccactgcacctagcgctannntctcgtcgatgacacagtgagtgcgatcgtgcggncgtgactcaagagactgacagcgagcggaccagtaggtgcaagcantccatacgtatgcaatacactcacgcgcagcacgatatcgntcatatatgtacacgcgctatgtgtcgagtaca

SEQ ID NO: 13899 - DNA, 318 bp, Glycine max
  Coding DNA Sequence Number=SeqID_4120
cagaagctattccagtaccagtattggagagtaccatcatcacagttatcggtactgcacaaataaacagcaacaagagttccgagagtagtatcactagtcacatcaccagtaagtctgaccaaagtgttggcatcttcacgattgagagtgtccaaggtggtaacgttagtgagggcgaggttgggaaggtcgccaacactactaacttcagtaatagcgttgttgacagcattgttgaggaactcatcttgggtatagactccagtatcttgaggttcatatccgacatagtcgcgaagataatcagcccaacta

SEQ ID NO: 13900 - DNA, 492 bp, Glycine max
  misc_feature (244)..(245): n is a, c, g, or t
  misc_feature (254)..(255): n is a, c, g, or t
  misc_feature (275)..(275): n is a, c, g, or t
  misc_feature (313)..(314): n is a, c, g, or t
  misc_feature (357)..(357): n is a, c, g, or t
  misc_feature (371)..(371): n is a, c, g, or t
  misc_feature (417)..(417): n is a, c, g, or t
  Coding DNA Sequence Number=SeqID_4121
gccaaggcgcccacccaatgaacaacccggtttggacttaaaccttggctagggaggccccttcggcttttttctaaaactttggcggggaaaaaggttcccttggtccaaaataaactgccttattctcgatggaacttgaacctggtcttccggatggtgcttcaccattgaggcttactgtagataagtggaagtgggaagcaagatataaaccggagtggagtggaattgtaatgtactnnggagcagannctgggaaggaggaggtgtgnatgtgtatgtatggtgggggaggagatgagaaagtgtnngagggctcacgtagtgtaaggaggtggaggatatgacgtggtnggtggaggggattngtagtaatagggaggatgagaagtgggagatggtggaggaggactntgatagtagtaaggaggtggtggagatggagatggaggtggaggggatttgtaataatatggagacggcggtgat

SEQ ID NO: 13901 - DNA, 340 bp, Glycine max
  Coding DNA Sequence Number=SeqID_4122
gtcgccatgaccacggcatagaggaggccacctagctccccctgccttcttgtcgagtccctccgctccgccattgcctcccgcatcgcctgctaccgctgggtctagccgggaaccgctgtgccgagcgccacgagctcgtcttcttcctcgactccgacgagatcctccgacggatgcgccacctctgctgctcctaatctgtcgccggccatcttgtgccgctcgatcccgagaccgatgctgcccctgtgatcgactacgtcgacgacgacccctccttgccagagcaactagatgtcagagcctaggatctagacgccacctttgacgacgactg

SEQ ID NO: 13902 - DNA, 515 bp, Glycine max
  misc_feature (415)..(415): n is a, c, g, or t
  Coding DNA Sequence Number=SeqID_4123
gtgtcctccctggattcgatagtcatcccgacgagtgctcctatgcttcacacctgtttatcggctgcgtgtgtgtgttatctgttggggtgtgcggacagattattatttatgtgtactctgctctattgttaacggctctccgtatgtgtccgtaattgtataatgtgtcatgttatcccatctccactctcctttcatcatcatgcttcgattgcttgtttatgttgcttcgtctgcgtcacgccgagagtccgttctcttttgatatgtattatcctttctagagcggcaaattctgcggttgcgtggcctcttcgtgtcggtctcttgtgctcgcgggggaagatacaaacacgtctacatatatgcccgtctgtgcccgcgctgtgactttctctgccttatttttgtngtgcgctgttcttttgttttctgggggaacataatagtttacttctgtgagttggagcgcgcttctctcctggagaaaactcctttcctgctgatgcggg

SEQ ID NO: 13903 - DNA, 427 bp, Glycine max
  misc_feature (76)..(76): n is a, c, g, or t
  misc_feature (182)..(182): n is a, c, g, or t
  misc_feature (188)..(188): n is a, c, g, or t
  misc_feature (236)..(236): n is a, c, g, or t
  misc_feature (283)..(283): n is a, c, g, or t
  misc_feature (288)..(290): n is a, c, g, or t
  misc_feature (324)..(324): n is a, c, g, or t
  misc_feature (332)..(332): n is a, c, g, or t
  misc_feature (362)..(362): n is a, c, g, or t
  misc_feature (364)..(364): n is a, c, g, or t
  misc_feature (368)..(368): n is a, c, g, or t
  misc_feature (379)..(379): n is a, c, g, or t
  misc_feature (396)..(396): n is a, c, g, or t
  Coding DNA Sequence Number=SeqID_4124
attgatagattgcatcgcttccgctcttgagccggacctaggcatggtgtgagatgcggtgcgtaagtgtacacancagagtgtgtagacagtgccttcggtagctagcgactcatgcctacgtcttgtatgtgtagagcgctgtgggctatttgtgtcgcgtgatacgaggggcgacgtcngcgcangatcaaccacatactcaccctaaagaaaaggccaccggacacgccacnttaagacacagatcaacgttaagacacaacacacgttcctattcctnccttnnntttatattcgcgtgctcgctgcgagtcgcactanagcgatcntctgcatttacctcgctcgtactggcttgntnctancagatgacatntcaaacacccacggtcnatctccggcgcacgacatctacggacaaaca

SEQ ID NO: 13904 - DNA, 450 bp, Glycine max
  Coding DNA Sequence Number=SeqID_4125
gaggatgacattgcgcactgagatatgctcgtgtgatttgtcttttagcgagtgctgatcatgatctgcatcttcatctctgattggcacactagcctgatgcatcaaccacgttcacgagagccagctcgtcttccacaaacggttaagatatcagactcgagtggagtatggaaatataatgtttggaaggcaatactctcgctcactagatggatgctgtcatctgcgtactggtcggagtagtagctagtagaatggtcctctccgctaattagccgggtcgctggggtttttctcttacggtcccccccattcgatcgtgcttaaatcaacctcactcggctgtttctctccccctgttctgtggccccccgccggctgtttccctctgtgggtttctcttcggcctcctctgcccctgccattctgctcctcccttttttggaa

SEQ ID NO: 13905 - DNA, 435 bp, Glycine max
  misc_feature (90)..(90): n is a, c, g, or t
  misc_feature (222)..(222): n is a, c, g, or t
  Coding DNA Sequence Number=SeqID_4126
gtaatatcataccacagaccgctaagatacaacatcttgactcggtcagaacatagcgtacgcatatactctcttccttcgagcgcctcntgggacgtcagcggatcacttctgtgctagtgtttaccttaatgatctaatcgtatgtatatgtgtgttttctatagctaattattgtatctctacattatactacttcgtatctaatcatatgcatccatnataatctttagatgtatgtgtatacttattatttgtgtattgttttgtaatctatcttaattagtctcttcaatgtgccctgtataatgatctactttcagtgttatcttctcgatgtatgcggttttgctcttatcctcctattcttctttaccctctctttttctgacattcaccaactccccaccacgcgacactctcgccgaagagaga

SEQ ID NO: 13906 - DNA, 397 bp, Glycine max
  misc_feature (99)..(99): n is a, c, g, or t
  misc_feature (218)..(220): n is a, c, g, or t
  misc_feature (261)..(262): n is a, c, g, or t
  Coding DNA Sequence Number=SeqID_4127
attgatgggcgtggacaggacacatggtaaattcaaacctgtgatcaagaaggcaatggtggagctagaaggggcacccttcaaaaagtaggcctcctngagggatgagtgggccctaaaaaatcgcttcattagtccaggtccaattcaattcgctggccgaggatctgatgcaattaatcacgctttactagtggagtttggtgcacaagcttaannnataatgagagcctttttgaatggtggcaaattcaaaaaatnngaaaaaaactacaaaaataatagaacggagattagacaaaagaaagagtctctcgcttagttctccctgatgttattgtgttcgagtgacggacgaatccaaccaggaaagagagatcgtaatgtaaatgccaag

SEQ ID NO: 13907 - DNA, 513 bp, Glycine max
  Coding DNA Sequence Number=SeqID_4128
aagatgagtcggtagttgaaaattctaaagccagtaattcaaattcactcctttaaagataaaatttgaaattttattttttcaactaactaaattttattttaaaattttaaaattcttttactaaaatattcaaacagttatttttaataaaaaaagaatttaatttcctacaaaaaatatattacttaattaaattatcctatccaaacacactcttatggtaattaaatgttaatgaattaatattcacacaacaaccaaggactcaaacataaaataattataaacttttttttttctgactataattttgtaaactctaaatacatactacaaccctcaaaagaatatagtataccttttattctttatttccttaattagtaaatgtcctttattattacagcactccttagtaagaccttctattattatcaaagccagctattgaagtcactttaatgtttcagaatcaagaacacattgttacggtatcatcagagaaattaa

SEQ ID NO: 13908 - DNA, 522 bp, Glycine max
  Coding DNA Sequence Number=SeqID_4129
agtggagtgcttcgtcagttgttatttgcttgaaagatgtccaaagcatatctcagaaataagcccttctttacttcttcatgttatacagagtaaaaaatcctgcgaggacaaagcagtcgagtgtactcttcttggtaaaaaacaaaaaaaacctaaactttgtgacgaatgtgacgatttatataactacgacaagcttatctgcgatgaagaacaagatttagaaaaattgaaaaaatgcgtcagttctaaactcatggaagtttttgacgcagattctgatatttgtgacgacttatttcttgatttaacttcatctcaattagtggacattataacaaaatctatatcaaaaatgtcagttcttaagaaaaggaaaaaaaggaatggttgtaaatgtaccaaaaaggcaagaaccaaagtacccaagttaaaatctgatattccttgttatagtgkggaagatatagaaaatattcagtgggagtgctatcttgaaaatttcaaccgttcggatat

SEQ ID NO: 13909 - DNA, 557 bp, Glycine max
  misc_feature (54)..(54): n is a, c, g, or t
  misc_feature (207)..(207): n is a, c, g, or t
  misc_feature (250)..(250): n is a, c, g, or t
  misc_feature (319)..(319): n is a, c, g, or t
  Coding DNA Sequence Number=SeqID_4130
ttattgcgtcagtcatgctcgtatcgtcgcgcagtcgatggtagatatatcacncgcggcgacgtattcgaccggctattagtacatactgtgcgggcgcggacatggcaattagacagacatgtatgatatacgacgcggcagccctcgtgaatgtccgatctcgcgatataatgatctcatctgtgatccacgtaccgacgagangtacacagaatacacaacggatgaagttgcgtcatcgatgtanatatatctaccgcgcgacatcattgagtaggctatgaatttgtgtgtcgcgagaggcgagtgttataancattcgcgcctgctaatatgactgtcatcgttatgcgtaattttgattgtgcgctgcgtcacacgtgctcggcaaatcattagtatacaaattctgatatcattgctgtactatgactgctagcgcagacgcgaatcggtgagataacatagacgttaacctctcgatactcttctctcgcgcgaccgtgtatgtgcgtctacaatttaattctatggttatacagcgcgtttgactc

SEQ ID NO: 13910 - DNA, 374 bp, Glycine max
  Coding DNA Sequence Number=SeqID_4131
aactgatttagatgaaacatgtgataagaaagaaaaaaaaagataaaaataaatgtgtagaaaaaatatttatggaaaataaataatcaaaagagacagagggaggagaaatataaaataagttttaatcatttcattatttaaatatataaaaaattgacaccttattaaatattatatatgatcatcttttattgttcacttatttttttttcatatatatacacatctaaaatatgtgcatcaatggtccaaattagtgttatcaatcactaccttcatggtgttgaatataaggaggtgccatctaaatttcttacttaccaagctgctgatgaccaaatttacaatggccacagatcagttgttgaatc

SEQ ID NO: 13911 - DNA, 478 bp, Glycine max
  misc_feature (183)..(183): n is a, c, g, or t
  misc_feature (210)..(210): n is a, c, g, or t
  Coding DNA Sequence Number=SeqID_4132
aaaggtatatcagacgctcggcgtgataaatataggtgcgcggggtcgggtgtgtctactagtagctcgtcaccacattattaattaccacgctaccctgagatatgcaggcgcggattttacaatatcacacacaccccggctatgaaggataaatatataaatagcacgagggcgcggagnagttgacgtcgtggtcggggttccgcnctcacgctctgtctgcctcgcttattcactcacatgtacctctgtcgccgcgcagctgcgtgctctatgtacttgttgctcgcggccgccggtgttggcggcttagttagggatatgcgccctacacatatcactggtactggtttgtgtatgagtgtataacttcacgcgcacaggcgctagtgcgtctgcgtcctccgcccgtcttactactctccactacccgcgcgtcacgatcgccgattatccttatgtacccgtatcatcg

SEQ ID NO: 13912 - DNA, 580 bp, Glycine max
  Coding DNA Sequence Number=SeqID_4133
catatttgctttgctcttctgcaaggtgttgaaacgcctctcaagccgcaatcgaggggtattagaggcggagcactatcttgtcggctacatcctacccgtcatcactggcgcgctcagctcagtgctctatggtcttgctgttcactttcgttggcaacctgcctgccatgtacttcgcgtacggtatcaacggcttctccttcataacactcatgatcgcaaacacactctgggtcaccgaagccttcccgcgatgggctgcacccgctatcgctgttgttggtggaggatgctacatcctctcctttgccatgagctttgcgcttgtgccttggatcgacgctcacggatacatgtgggttggtattgaactcatgatcttccaggtcttgggtgggctggttgctatgccagtagccttttggggtaagagtacgcgacaggccatcgctggcaggtggtctgaagaccggagtggtgcgcttcgtccgctctaggatttgtacatggcatccttgatgctggtagtaattagttgcagggttatgcttctagagcagtggtcatcggcttcact

SEQ ID NO: 13913 - DNA, 436 bp, Glycine max
  misc_feature (93)..(93): n is a, c, g, or t
  Coding DNA Sequence Number=SeqID_4134
aagcatagtagagcagaggagagtagtgtggtatatatgtttatgtatatgtgttgggatgatgatcgcagagggagaggaagataagatatntgtggacaagcagaagtatagaaggagtggggagcagtgaggagaggtaagagagggtgtgagcgggaggaagtgggagatagaggagagagggggtagtaggaaggactaccgcatataggtagagtataatgtaatattgatgaggagagaggtatgaggagagagataggaaagagaaaagtgagatgtgattgtagcagtaggtgaagatgagtaagagataatatagaatgaatgatgacgagggaggaaaggatgcgagtgcgcgtgttgtagtggtgagagatggacagaatgtggtgggtagttggaggtctctggcctgatgtagatcagagga

SEQ ID NO: 13914 - DNA, 523 bp, Glycine max
  Coding DNA Sequence Number=SeqID_4135
aatccttcatatcactgccggcgcgcaagagaggaccatccttgttctgccctctacctcgttcatacaaacatttcgcacacgcagctctatctctccacaacacatccaccatgggtctcatcaagggcggcttcttgcgcctgttccaaacactgctatacgcgctctgcttctgctgcgccggcattgccctcggcatctactcatacttcctcgcggtccaagccgatcgcgaccagggcatccccagatggcaaaaggctgttgagggtatctccggcgtggctgttctgtacaccatcgctgccgtggtcctcacttgctgccttggtggtatcagcttcttcgccttcaccgcgattgtccttgacatcctcttcgtcggcggcttcattgccatcgctgttctgacccgccacggtgcttcctcttgcactggcatcgtcaacacccctctcggtatcggcaatgccaacgccaactctgagggcttcggcaacaacggtctcggcactggaaa

SEQ ID NO: 13915 - DNA, 474 bp, Glycine max
  Coding DNA Sequence Number=SeqID_4136
agcttggaatttggctcgttcttgagcccccttgtacaagggagccatagctaatgtctgcgggggggcttttcagattgttgcctgaggttcccgaacacaagtcacaataaaacattttgaggcagccattgataggaccattggtggcttggaaaagaggaacaaggtcattactacgctggaaaggcggactgttgcctaccaagacccatgccatgctgcttcaagttggaccaaggagcatgttgagcccttgttgaaagtaactattaatgctggttctgccgttgctcatgggtttgcccaatatgctcccaatgagaaccttcttatgacaaaagatcaggtttttaatacgacttgtatgacacttggcggtcgggctgctgagcaggctcttattgggagaatctcaacacggagcacccaatgacttggaaaaagtgaccaatctgacttatgcccaagtat

SEQ ID NO: 13916 - DNA, 330 bp, Glycine max
  Coding DNA Sequence Number=SeqID_4137
ttattcccttcctttaaaccatgcttcaacaacaccctcaacaacttgactcttactttaactcttccataagtcctactactatccccttttggtcctaacatggactcgtgtctctctcatgacccatttctcgcgtgctttacttcagcacagcagcagtagtagcaacatggccctcgaccggggttttgattcggcactgaacactgggattcactcttttgatcctgctacccatttttttttcaaggccccaaaggtggggtttcaagttctcggagctccaaaccctgggttgaacttgggaaatgtaaatggccccctttg

SEQ ID NO: 13917 - DNA, 434 bp, Glycine max
  misc_feature (131)..(131): n is a, c, g, or t
  misc_feature (133)..(133): n is a, c, g, or t
  misc_feature (227)..(227): n is a, c, g, or t
  misc_feature (229)..(229): n is a, c, g, or t
  misc_feature (235)..(235): n is a, c, g, or t
  misc_feature (281)..(281): n is a, c, g, or t
  misc_feature (355)..(355): n is a, c, g, or t
  misc_feature (361)..(361): n is a, c, g, or t
  misc_feature (387)..(388): n is a, c, g, or t
  misc_feature (397)..(397): n is a, c, g, or t
  Coding DNA Sequence Number=SeqID_4138
ggcgcaccgacatcacacacatacaccacaccacactacactcagcagagacatagagcacatcagcagcgagacagaccgtcagacacggacagagacagagatagacatatgtagatctatatatagangnggacatatagggagagagagagagatacatacagagagacgtcagcgacgagacagacagacagagatagagagagacgagcacagagagacananagaaanacatatatacatccatgtaggaggagacacagacacatagagaganacatacatacatcgacacacacaccgcgtcacagagagagagacacacacaccccccgcgctcgacagcaacgnagcgcngcgccgcgcgcgcgccgcacacaacnngccacacgnaacggggctgtggggtcgtgccgcctgggccggacgg

SEQ ID NO: 13918 - DNA, 516 bp, Glycine max
  misc_feature (159)..(159): n is a, c, g, or t
  misc_feature (384)..(384): n is a, c, g, or t
  misc_feature (491)..(491): n is a, c, g, or t
  Coding DNA Sequence Number=SeqID_4139
ccggtgtagcgtgtgtgggcgtgtcggggtattttctcattcatcgtcttgtatttttaattgatcataagcttttaatctgccttataattgttatgagtttagataagttagtatatgttatggtgatgtatgttgttatttgtggttatttgcgtntgactttttatttttctttaattttttgtcacgttaggtgttgggacggagagaagtagagaacagagaaagataagaaaacaaaaaacataacagaagaaagacagagaaagagggagcgaggagaggcgcgcgcggggcggaggagaggagtggagagcgcgggagaggggacggcgggggggtggacccgggggaggggtcgggtggtggtttggtgtgtanggcggtggtggtgttttggagggggggtggtttggtgtggcgcgttcgtgctcgtcgtttgttggtgtcgcgcgtcgctactcatgtggtgactcctttaacatccnctgcaagtcataacattcataacta

SEQ ID NO: 13919 - DNA, 497 bp, Glycine max
  misc_feature (408)..(409): n is a, c, g, or t
  misc_feature (426)..(426): n is a, c, g, or t
  misc_feature (452)..(452): n is a, c, g, or t
  Coding DNA Sequence Number=SeqID_4140
atatatcgtagtgaaaagcggcaacgaaccaacagacagccaacagtaaaatctaaatgcataatgacaagtgtggcggtagcttctctgattcccatcacatttcataggaagagagggataagcgtatgagtaaatagtctaagctccacatccacccacgtcaagttctaaaacctacgcagtacgcacacgcacattacgcctacaaccctaaagacccgaacgcacagcctcttacaccctcacgcacacgccacaatcggatcccaaatcaattaaagtcatcagccatccaaccgacacaaccacaaacgcaatcccaaagcgttcaagtgcgctacgctcacacgcacaacattcacaatctacccccaccacgaccgccaagtgctgacggcgaagatnnggggggcccggaggggnaagggcgagaggacaagcagcacggnagtacaggacgcggttagaagatagaaaaacggtcacgcggcagg

SEQ ID NO: 13920 - DNA, 536 bp, Glycine max
  misc_feature (41)..(41): n is a, c, g, or t
  misc_feature (287)..(287): n is a, c, g, or t
  misc_feature (343)..(343): n is a, c, g, or t
  misc_feature (470)..(470): n is a, c, g, or t
  misc_feature (502)..(502): n is a, c, g, or t
  Coding DNA Sequence Number=SeqID_4141
gtccctttcgcttcatttacatatctctctacccatcgtangtagtgtagacgagtatatcatgtcgcacacaacaccaccgctcctgtgcgtctcatgaatacaatagatagtagtgtatcccgcacccgcgatacgtagcatacataagtctacgcaaatcctatcacttatctgcatttgatatacacatgcacactccacacgtcaacatacactcaatcatgccccaccgcagctagcgacgccacattggacaatctcaccaacactctactgacatgcgngaacagataaagatcgtgagatttacacaagaatatatatacgtcgcctgtcgtgngcaccgacgcaccaacgcaaccaaccgcaccgatgcggcctctgctagtcacatacagtgcgctgcctgtcacctgctcgcgactgtgtttctgcacttctcgctctattgtgcaactagagacagngcgctccacaacatacacacgcaacgctcaancgctactctatgctataactcaccattctgttcc

SEQ ID NO: 13921 - DNA, 586 bp, Glycine max
  Coding DNA Sequence Number=SeqID_4142
gtcttcatggaggacttccgtcagacttacaagaaggaacaccccagcaacaaatctgtcgctgctgttggaaaagctggtggagagaagtggaaatcactgtctgactctgagaaagctccctacgtagccaaggctgataagcgcaaggttgagtatgagaagaccatgaaggcctacaacaaaaagctggaggaaggtccaaaggaggacgaggaatctgacgacaagtcagtgtctgaggttagtgaagaggaggatgcggatgataggagtgatgaggaggaagacgattgactaagaagttgaagttggcagcattatataaggacctctgcaaggatctctctgatgccttttttttttttttttttttaatcttcttttcccttgcaatgttaacgaggctggttaaaattaaaatggggggttttctgcttttatatttactgctgtttctatttagtaagctaccactatctcccactgactctgattttacgggtaatggaaaaaaatgttttagatggtgatcttgatatttgcagctctatattttatggctgctctatgtttgttatgatcg

SEQ ID NO: 13922 - DNA, 594 bp, Glycine max
  Coding DNA Sequence Number=SeqID_4143
gcgctatagttgaaagtggcgttcatgacattaacaagttgtaaatttggaacatgagctttttggtaagagtgtctttggttattggttagaagaggttggattaactacttaaaaatcgttgtttttataaaaatacaaaaagaataaaaaaagcgatttgtgttttttttttcttgcttataaatatgttatcatggctgtaaatctgctttgatgatcattgcttattgatcgattcaaaagaatagatgagattcccttccctctgtcggtctcttaaggacgcttgaatgcaagaattaatgaaattgaacacatcacatcaaatgaaatgaagtcttctccctctcctctgcaattcataaaaacaacctgaaaacagccatagacatcatagaagcaatagactctctccctctaattaataattcgtgaaacacataatgaagcaatcaatacatttcttccaaaagctcttccaaaaaaacatcaaatcattataataaaacacacaaattcaataaattcatatattactaagtttctttttattttcaatatataaaaacacttcatcgtatttctcgactt

SEQ ID NO: 13923 - DNA, 495 bp, Glycine max
  misc_feature (26)..(26): n is a, c, g, or t
  misc_feature (31)..(31): n is a, c, g, or t
  misc_feature (55)..(55): n is a, c, g, or t
  misc_feature (57)..(57): n is a, c, g, or t
  misc_feature (81)..(81): n is a, c, g, or t
  misc_feature (86)..(86): n is a, c, g, or t
  misc_feature (98)..(98): n is a, c, g, or t
  misc_feature (180)..(180): n is a, c, g, or t
  misc_feature (209)..(209): n is a, c, g, or t
  misc_feature (222)..(222): n is a, c, g, or t
  misc_feature (262)..(262): n is a, c, g, or t
  misc_feature (318)..(318): n is a, c, g, or t
  misc_feature (323)..(323): n is a, c, g, or t
  misc_feature (337)..(337): n is a, c, g, or t
  misc_feature (360)..(360): n is a, c, g, or t
  misc_feature (366)..(366): n is a, c, g, or t
  misc_feature (382)..(382): n is a, c, g, or t
  misc_feature (395)..(395): n is a, c, g, or t
  misc_feature (434)..(434): n is a, c, g, or t
  misc_feature (450)..(450): n is a, c, g, or t
  misc_feature (467)..(467): n is a, c, g, or t
  Coding DNA Sequence Number=SeqID_4144
gcgcactctgcatcactatcggctgntcgtncgccacacatactcctacgtctcntngttatgccgtcactcatatcaagncatantctacgatatgngatccgctgcatcatgtgctcgtatttcgctgatgacgcagccgataccacacgacgccacgactctatgacgatcgtgatntccatcgtagacgtattgatgtgacgtgngacgactgtgtgntgccgatgtattgtctaatgcgtcatctgacacatcgtanctcgtatatatcttactagctcatctgcgcatacatatcgcagtattgactctcantgccnacgcgtagaacctntttcgtagctgagcagcgctgcntactgnactatccgttcaccanctgctctgcgtanctgtgtctgatgattacattctagtacatccatgctagncgatcgacagcctgcnctcgtcatgcttcgttnagtgtaagtatatctattcgtctgctat

SEQ ID NO: 13924 - DNA, 573 bp, Glycine max
  misc_feature (101)..(101): n is a, c, g, or t
  misc_feature (522)..(522): n is a, c, g, or t
  misc_feature (525)..(527): n is a, c, g, or t
  Coding DNA Sequence Number=SeqID_4145
gatcgacaggcaaccacgcggagttggagagagagcatcagatgtaggcgggcgagcacgcgaaatatccaattatagaaagacggacggtcgaaaaaatnaatatactgaccttgtggtgcctagacggatattggatacgctctctattcccgccccgggtatgtgcgaaaaggcgtgcgtgaacacacaagcgagagagggtgtgaagagtagataagcgtgacctggacacaagaaacacactcctatgtatgagccaatcgacacgcacaggcgtggctgaaagcacacagctaagaataaactgagacttatatgctcttatacttattcgtctataatcttatctatctcgtaggtggctgtgcgatgcggcagaggcgtgtgttcgcatagcgatctgccacatagatgagccgagaggtcgggtgtcgacgagctgactctagcagtacccctcccaaaagaattaagatatatagtgtggatgtgtagagtaaacattcaggcgctgcgagnggnnngcgttcatataaaatgatatccagagcgggctgtgatgtatttcat

SEQ ID NO: 13925 - DNA, 590 bp, Glycine max
  misc_feature (45)..(45): n is a, c, g, or t
  misc_feature (52)..(52): n is a, c, g, or t
  misc_feature (73)..(73): n is a, c, g, or t
  misc_feature (120)..(120): n is a, c, g, or t
  misc_feature (130)..(130): n is a, c, g, or t
  misc_feature (141)..(141): n is a, c, g, or t
  misc_feature (147)..(147): n is a, c, g, or t
  misc_feature (156)..(156): n is a, c, g, or t
  misc_feature (198)..(198): n is a, c, g, or t
  misc_feature (208)..(208): n is a, c, g, or t
  misc_feature (370)..(372): n is a, c, g, or t
  misc_feature (375)..(377): n is a, c, g, or t
  misc_feature (380)..(380): n is a, c, g, or t
  misc_feature (388)..(388): n is a, c, g, or t
  misc_feature (432)..(432): n is a, c, g, or t
  misc_feature (445)..(445): n is a, c, g, or t
  misc_feature (458)..(458): n is a, c, g, or t
  misc_feature (483)..(484): n is a, c, g, or t
  misc_feature (498)..(498): n is a, c, g, or t
  misc_feature (518)..(521): n is a, c, g, or t
  misc_feature (523)..(523): n is a, c, g, or t
  misc_feature (530)..(530): n is a, c, g, or t
  misc_feature (552)..(552): n is a, c, g, or t
  Coding DNA Sequence Number=SeqID_4146
ggtagagtgctctccgacgacagaagtagagaagaggagaggggnagtgagnagagagtaacggagatgatanttgatgaggcgcgtagagagaacgataatccccttcggctcgatccnctacctaacnactacaacatntacacntaagtttanttgtatgtttacgagtataaacatgatgttattatgtttatnttcgtctctnatctctgttgatgtaagtaggtcatctatatgtcatcacgtattatgtagctatcagattagtgagtgatagtggatagtgtaataggatgtgtatattgcggtctgtgctgctgtgattgtgatgttgtgtgtggttcttatggcgcaaggcgtgtgacannnctnnntcnccaaaagnaatatcgactcttgttactctatgtctagacgaagcgtcatgtncttatctatgttntcttcgaggagangcgagggccgggcacagcgccccgnnggccgggagagganggaagatgagtgtaagggtnnnntnggggctncgcgcgggcgcgcgcggcccgnctgagagaggccagagcgccctgcgacagagaaaagga

SEQ ID NO: 13926 - DNA, 303 bp, Glycine max
  Coding DNA Sequence Number=SeqID_4147
tttcacctcttgcaaaagaacagacccattcactccattttcagcgccaaaaaacctactaatatattatgtatgaaaaacaataaaatttctactagcatactgtacacatccactactatttagagtctttgtaagttacttaagtatcacgttcttactctaatatgtcacatgttgatactatgactcgcaagtctattcttataatacaatacccatgacttgatgcacaaatctccacctcacatgccagaatgtgatgttgcagaagagccggtcctgcgaattacatctacatta

SEQ ID NO: 13927 - DNA, 459 bp, Glycine max
  Coding DNA Sequence Number=SeqID_4148
gggtgaataccaacatacgattgatacaaaagggcgcatgatcatccctgctaaatttagagacggtctcggagaacagtttgtgctgacgagagggcttgatcaatgtttatttggctaccctatgagtgagtggaaactaatcgaagagaaactcaaagcactgccgctaacgaaaaaagatgcacgtgcgtttacccggttcttcttctccggcgcagttgaatgcgatctgggcaagcaggggcgcattaacatcgcatcaaacctactccaatatgcaaaactcgaaaaagaatgtgtggtcatcggcgtttcaaatcgaattgagttgtggagtaagtcgatctgggaacaatatacagaagagcaagaagattcttttgctgaaattgctgaaaacatgattggatttgatatataataatcccttgtgcagcaagctttctacacattcat

SEQ ID NO: 13928 - DNA, 463 bp, Glycine max
  Coding DNA Sequence Number=SeqID_4149
ccttggtgggcctggttaaccaatggaaccaaagaacctgggatgggaccaaccacaagtttcaattccgggacttagttggtggtgggaacccaaaccagcctggggaggcaacaagggttgggggccttgcccaaaccaaaaattttggtccaaacccagagcccccggaaggttaaaaagccatccggggcccaccaaaaggggtaattccaccagccttctttggtaaaaatgggcccggaaccctggttttcgcgctctctcccgctgccgatttcggcgccaggccctttatcgatggcaccttttactacacaggaattagctattgttggagaaattgttgaaaggtttcatttaatatttgtatcatatgctcattctttattcactgtttgtaaaaaaaagtaaacaaatgtatacgaatgttgagggtgggataattcaacttctttttggt

SEQ ID NO: 13929 - DNA, 511 bp, Glycine max
  misc_feature (55)..(55): n is a, c, g, or t
  misc_feature (62)..(62): n is a, c, g, or t
  misc_feature (83)..(83): n is a, c, g, or t
  misc_feature (98)..(98): n is a, c, g, or t
  misc_feature (100)..(100): n is a, c, g, or t
  misc_feature (102)..(102): n is a, c, g, or t
  misc_feature (115)..(115): n is a, c, g, or t
  misc_feature (126)..(126): n is a, c, g, or t
  misc_feature (185)..(185): n is a, c, g, or t
  misc_feature (193)..(193): n is a, c, g, or t
  misc_feature (198)..(198): n is a, c, g, or t
  misc_feature (212)..(212): n is a, c, g, or t
  misc_feature (217)..(218): n is a, c, g, or t
  misc_feature (260)..(260): n is a, c, g, or t
  misc_feature (267)..(267): n is a, c, g, or t
  misc_feature (280)..(280): n is a, c, g, or t
  misc_feature (282)..(282): n is a, c, g, or t
  misc_feature (285)..(285): n is a, c, g, or t
  misc_feature (287)..(287): n is a, c, g, or t
  misc_feature (290)..(290): n is a, c, g, or t
  misc_feature (312)..(312): n is a, c, g, or t
  misc_feature (341)..(341): n is a, c, g, or t
  misc_feature (373)..(373): n is a, c, g, or t
  misc_feature (434)..(434): n is a, c, g, or t
  misc_feature (441)..(441): n is a, c, g, or t
  misc_feature (462)..(463): n is a, c, g, or t
  misc_feature (467)..(467): n is a, c, g, or t
  misc_feature (473)..(473): n is a, c, g, or t
  misc_feature (479)..(479): n is a, c, g, or t
  Coding DNA Sequence Number=SeqID_4150
acgacgtcactatctgatacgatcgtttctctcgcattgctgtgcgcatatagtngagcttncgtaatatagtatatagtaangaaccagtacagcantnanttgaagtaggagntgatgagtgtnatgagtacgatactcgcactactgcatgatggcggacgctatgacaacacatcatgtcntcacatgntcganctacgctcatacgntgcgnntgctacgatttgtcgtccgctgctcagtgtcgtgatcatctncgtatcngctgacctatgtntntgntnatntttagtagtcagtcgtacgatnactgatacagagatgactatcggatctgntgaggtcagctgactgtactcgtactcgtccntattatcacgttataacgattatgttactgtcaatgattatgtactcgatgacgatgccgnatcttcntcacgcgtacagtggtcgacnnctcnacgcancgtgtncggcagaggacgacgacgcagtcacgacgcgc

SEQ ID NO: 13930 - DNA, 406 bp, Glycine max
  Coding DNA Sequence Number=SeqID_4151
tcaccgttacgagtgagttcgacccctcctcttgctcttccttctcttctcttctcttctcttctcatatcaaagcaataaccctagaacatggaagagagcttcgttttccagtggagcgtcatcagatctctcttgtccatccttcagtggtgggcgttcaatgtcaccgtcatcatcgtcaacaagtggatcttccagattccgccgttactatgctcgacactgatgcttcgtgtgtaatgaaatagtccgagtgtggtttcagaatacaactgccgtggattactgttttttttggagtatttgtgttgattgctattttcggcgttgcgttttgatttgtagaattgtggttgtttgacgaaacctttattgtgcgtttcgatcgagttgttttgtgttt

SEQ ID NO: 13931 - DNA, 532 bp, Glycine max
  Coding DNA Sequence Number=SeqID_4152
aaactctgtccaaaaatgcgctgatttccttaaagctttcatgctcggttttgacctcaatgatgccatcgccatgttgagacttgatgatttgtacattgaatccttcgaaattaaagatgtcaaaaatcttcaaggagaccatctttccagatgtatcggtcgtatctcaggtgaaaagggtaaaaccaagtacgctgttgaaaactctaccaagaccagaattgtccttgctgatagcaaaatccacattcttggaagtttcagtaatataaagatggccagagatgctatctgctctttgattcttggtagccctccasgaaaggtttattctcaattgaaatatattgccaaaagacaaggtgaaaagttttaattgcaaggctttgtatatggaaacttattcaaaacatcctcaacaaaagcatgtgtatgccattgagcaatctattttttgtttcatgtgattatggtgactagttttcagggtataaaagttgttatatatagctgattcacgttcgtattt

SEQ ID NO: 13932 - DNA, 527 bp, Glycine max
  misc_feature (43)..(43): n is a, c, g, or t
  misc_feature (48)..(48): n is a, c, g, or t
  misc_feature (154)..(154): n is a, c, g, or t
  misc_feature (168)..(168): n is a, c, g, or t
  misc_feature (173)..(173): n is a, c, g, or t
  misc_feature (177)..(177): n is a, c, g, or t
  misc_feature (179)..(179): n is a, c, g, or t
  misc_feature (189)..(189): n is a, c, g, or t
  misc_feature (196)..(196): n is a, c, g, or t
  misc_feature (198)..(198): n is a, c, g, or t
  misc_feature (210)..(210): n is a, c, g, or t
  misc_feature (221)..(221): n is a, c, g, or t
  misc_feature (227)..(227): n is a, c, g, or t
  misc_feature (231)..(231): n is a, c, g, or t
  misc_feature (239)..(239): n is a, c, g, or t
  misc_feature (244)..(244): n is a, c, g, or t
  misc_feature (276)..(276): n is a, c, g, or t
  misc_feature (308)..(308): n is a, c, g, or t
  misc_feature (317)..(317): n is a, c, g, or t
  misc_feature (328)..(328): n is a, c, g, or t
  misc_feature (332)..(332): n is a, c, g, or t
  misc_feature (337)..(337): n is a, c, g, or t
  misc_feature (339)..(339): n is a, c, g, or t
  misc_feature (346)..(346): n is a, c, g, or t
  misc_feature (352)..(352): n is a, c, g, or t
  misc_feature (357)..(357): n is a, c, g, or t
  misc_feature (367)..(367): n is a, c, g, or t
  misc_feature (372)..(372): n is a, c, g, or t
  misc_feature (394)..(394): n is a, c, g, or t
  misc_feature (407)..(407): n is a, c, g, or t
  misc_feature (418)..(418): n is a, c, g, or t
  misc_feature (424)..(424): n is a, c, g, or t
  misc_feature (431)..(431): n is a, c, g, or t
  misc_feature (435)..(435): n is a, c, g, or t
  misc_feature (469)..(469): n is a, c, g, or t
  misc_feature (474)..(475): n is a, c, g, or t
  misc_feature (481)..(481): n is a, c, g, or t
  misc_feature (493)..(493): n is a, c, g, or t
  misc_feature (496)..(496): n is a, c, g, or t
  misc_feature (499)..(499): n is a, c, g, or t
  misc_feature (502)..(502): n is a, c, g, or t
  Coding DNA Sequence Number=SeqID_4153
tacatctacgtctacatctactacttctatcgcgctacgggcngctcntcatgtgtgacgggacgagctctgccgtatcacgttcgtcatcttcatatgactatgttgacgtgtgtgattgtacattacgatgtggtcgtgtcagctagctgtngtatcttacattanttagnactngnatgtgttgangtcgtantnctgctgcatcgngtggtatttgntgattnatantatgacanatcancattgagtggtactatagcaggagcactgatncagtcggtcgctactgtcgtctcaagctcgtncgcttattngctgtctgttntcanactantngactatnattgtngtatngatgacagtnacgantatacattactagtgctgattngataattgcatantattgaaaganactatnacgaaanaatncatatacattaattactacatgaattacatgatncatanntagtanatctatcattanatngangtntagctgtgagacgtaaactaattag

SEQ ID NO: 13933 - DNA, 511 bp, Glycine max
  misc_feature (63)..(63): n is a, c, g, or t
  misc_feature (108)..(108): n is a, c, g, or t
  misc_feature (113)..(114): n is a, c, g, or t
  misc_feature (161)..(161): n is a, c, g, or t
  misc_feature (166)..(166): n is a, c, g, or t
  misc_feature (172)..(172): n is a, c, g, or t
  misc_feature (186)..(186): n is a, c, g, or t
  misc_feature (206)..(206): n is a, c, g, or t
  misc_feature (232)..(232): n is a, c, g, or t
  misc_feature (234)..(234): n is a, c, g, or t
  misc_feature (239)..(239): n is a, c, g, or t
  misc_feature (306)..(306): n is a, c, g, or t
  misc_feature (377)..(377): n is a, c, g, or t
  Coding DNA Sequence Number=SeqID_4154
tatgagccctcacaacgacagcgagcgaggatagatactgtgatgctgtgctcctgtctggcncgtagcgatggtgacatcgtctcgtagatatctgacgtatcctgnaggannacagacctgtccaaacctctcgctcacttgagagtgatgtaattgtnacaanattgcnaagcagacaaacanagcgctgttccccacattgncagtagacaccatatacaatctgtancncagcngcgctcacattacgagagtgcatgcgtgtctacgctgcctcgtcaggaagacataccatacttgtcntttatactctacactacttttcgcctactatggtacatgggtacttctgccacaggagacgcgtgcgcacntcttgtcatctgcatgctcatgtctcactacgtaccctgtgctctctattgcatttattactatagtgacacgtgtgatctgtttccactcatcacatgatcttgtcattgaagctactgtgtgcgtactgcac

SEQ ID NO: 13934 - DNA, 540 bp, Glycine max
  misc_feature (37)..(37): n is a, c, g, or t
  misc_feature (229)..(230): n is a, c, g, or t
  misc_feature (282)..(282): n is a, c, g, or t
  misc_feature (290)..(290): n is a, c, g, or t
  misc_feature (330)..(330): n is a, c, g, or t
  misc_feature (332)..(335): n is a, c, g, or t
  misc_feature (397)..(397): n is a, c, g, or t
  misc_feature (399)..(400): n is a, c, g, or t
  misc_feature (405)..(405): n is a, c, g, or t
  misc_feature (408)..(408): n is a, c, g, or t
  misc_feature (432)..(432): n is a, c, g, or t
  misc_feature (435)..(436): n is a, c, g, or t
  misc_feature (440)..(440): n is a, c, g, or t
  misc_feature (443)..(443): n is a, c, g, or t
  misc_feature (450)..(450): n is a, c, g, or t
  misc_feature (472)..(472): n is a, c, g, or t
  misc_feature (476)..(476): n is a, c, g, or t
  Coding DNA Sequence Number=SeqID_4155
gtatgtgtgtgtgtaggcgggcgctgagtagtgtggnggcgacgctttcattcaccgtttggccgcgcgcaattatacataaaacccacgaatatgaaaaagaagtgtgttgatataaattatgaatgattagtctgttgtcagtattaaataatatatttgccgagaatagtgtatctagacttgatcccagccacgttaacctggtcgcgcagaagaacatatgttnntgtctggcacatttgtgcgtatgtggcgccaggaagcaacgccgatcccagngggaagtntcatagttagagatagatgtgagagcgagtgagtgtaagnannnnttttctctcattttcctctttttccttcctaccctccttcagacgtctcccttttctcccantnnactcnacncaacatatataatatattatccanaanntacnctnaaaatcnaacaaaagaaagtaaataaagngaanaataatacgatgcacaggacgagaagatatagaatagtgtataagagagcggaaggtatgagca

SEQ ID NO: 13935 - DNA, 558 bp, Glycine max
  misc_feature (355)..(355): n is a, c, g, or t
  misc_feature (382)..(383): n is a, c, g, or t
  Coding DNA Sequence Number=SeqID_4156
gtgtgttccatatttacaccgcgctgcggctctcttatgtgccacccatctatgacttccattttctcttttgttaagtgcgcgccgactttactcacttctggttttttttctcttattattatttatacctttcttcctattccaaataatataccgcgaggatttcatctagaaataaactccagggagtgcatgatcttttaatctctcttactatcatcaaaacaatccgggcgggtacctattataaagtaatgagggtgtgtgttacacacccactcacgctgggtgcagaccctcacaccaacctatgtgttatggtcgcgccgcttcatactccgcgtcccatctncatctgtgcgacaacccctttatgtcnntgttgttcttctcttactattgttttcaaccttctatgctcttatctgcatagcatcacgcgccctcctctcctgtgctcctcttcctctctccctcctcattctacgcgacaatacacacacgcacacaactaaattctctcttcgtgttctgtgtttctcgttctcattttaa

SEQ ID NO: 13936 - DNA, 530 bp, Glycine max
  misc_feature (48)..(48): n is a, c, g, or t
  misc_feature (121)..(121): n is a, c, g, or t
  misc_feature (146)..(146): n is a, c, g, or t
  misc_feature (200)..(200): n is a, c, g, or t
  misc_feature (246)..(246): n is a, c, g, or t
  misc_feature (251)..(251): n is a, c, g, or t
  misc_feature (253)..(253): n is a, c, g, or t
  misc_feature (256)..(256): n is a, c, g, or t
  misc_feature (327)..(327): n is a, c, g, or t
  misc_feature (371)..(371): n is a, c, g, or t
  misc_feature (415)..(415): n is a, c, g, or t
  misc_feature (453)..(453): n is a, c, g, or t
  misc_feature (457)..(457): n is a, c, g, or t
  Coding DNA Sequence Number=SeqID_4157
gcgcgatcgtgaacagattcgtacacctctcacctacctcctagagantgatagacatatgcgacggtgatcgacgagtcgatagtatatgtacgcgatgactctacatacgtgacgtcgncacagctactaaatatatactaganccctctctcatgatggcctctactgaagtgctcgacgcactgcacgcctctacnataatatgtaccgactcaccgtgcggccgtccgtcgcgtctctccnacttncncgnccacatatcgtcgcgcgctcgacctgcgccgtgccgtcctcgactcgctcgccgtcacgcacacataatanccgtgtgtgggagagcgtgcgtgcgcgcgcgctctcacaacacncacacaccgcacgacgctacgtatcgggtgtaggagtctctcgnatatatatacacagtacttatatactacaaactagtgntggncgcggagcacgagatatagcaacacacagacagggccgactgtccgcgagtcgcacactctgatcttgatata

SEQ ID NO: 13937 - DNA, 215 bp, Glycine max
  misc_feature (160)..(161): n is a, c, g, or t
  misc_feature (166)..(166): n is a, c, g, or t
  misc_feature (169)..(169): n is a, c, g, or t
  Coding DNA Sequence Number=SeqID_4158
ctctaatggcgcttccacacatactctcttcaccaccgtccctcaacttcgttatctccgtctttcaaaccaaagccgcctctctcaccggcctttgctagtaatctccggcggtgcaagctcacatccttccgatgttcgtcgtcctctttctccgagnngcatnacnacgcgaaccctccaaaacccgatgacgtcgtcgagcttcctctctt

SEQ ID NO: 13938 - DNA, 459 bp, Glycine max
  misc_feature (120)..(120): n is a, c, g, or t
  misc_feature (187)..(187): n is a, c, g, or t
  misc_feature (300)..(300): n is a, c, g, or t
  misc_feature (314)..(314): n is a, c, g, or t
  misc_feature (341)..(341): n is a, c, g, or t
  misc_feature (349)..(349): n is a, c, g, or t
  misc_feature (351)..(351): n is a, c, g, or t
  misc_feature (414)..(414): n is a, c, g, or t
  Coding DNA Sequence Number=SeqID_4159
taatcgtcactcgagtctcgcctatacgctcgatgacgacagctactcggcgatgcatagagtgagtgattactgtactcgacgcgaggcagctgctcgacacacgcagcgagcgcgggnacatcacgcgatgagcgcacagtacaagcagctagaccagcgcagtaccatcgcatctatacacgcntgaggtgcgcgacatacaatacgcacctaacgcggtgcgcgagtccacatcaatatcgcgcgcagccagggtcgcctcgcgcacacaaacaccataccgctccgttgcgtatntactcttcgccggngagtcgtgcatcacgctctcgatctanggcgcttngnttgatgatggaatggtagcacacgcagatcgcagcatgagacgtatagtgatgatgtgtgtanatatgatgcacagtaatctagatgctttgctgtctacttgtatat

SEQ ID NO: 13939 - DNA, 356 bp, Glycine max
  Coding DNA Sequence Number=SeqID_4160
aaagcatcgccattatcaatgcaagacaacccagttactgctcaagtcttggaactcctcggcaaaaccggttccagaggtggtatcactcaagttagagtccaactcatcgaccccaacaatggtcaacaaagacaattgatcagaaacgtcctcggtcccgtcagaaagggtgatactctttcccttatggaatgcgaaagagaagccagaagacttagataaacaataaattttgccagtttcgggatatatgaattgaataaagatgcattcattatgtattaactacatgaattggtactcaaaccatttatcttttgcgagagcttcgtgcaccgtgatgtatgtcaaac

SEQ ID NO: 13940 - DNA, 468 bp, Glycine max
  Coding DNA Sequence Number=SeqID_4161
gaagcttgttcatctttattacataatctggaagctattgttccatattgaacacttggacagattgaataagaagcaaagaagaggctctactgatggtcaagaaagagaaaaaatggccagatctatgcctactatgagccttgaatatggagatagtgtgataagtttgtatcatgatttgagaacaggtatcgtcgatttcatctttgaaatctttattagaagtgctaatcatgctcatcaaaagaaagtcaattcattgattttgtttattatcaatgtgaaagaattgaaagaacgtaatattggcttctatttgcttcttctcgatactttcatgagaataagagatgttgtaaagattcatgtgaagacaggacagagaggaattgaaggaggaattgcgaatggaatttcaacaggaggatcaccagataagagaaagactgtggatgttgaatttag

SEQ ID NO: 13941 - DNA, 374 bp, Glycine max
  misc_feature (148)..(148): n is a, c, g, or t
  misc_feature (255)..(255): n is a, c, g, or t
  misc_feature (333)..(333): n is a, c, g, or t
  Coding DNA Sequence Number=SeqID_4162
gcgttttccatattttcattctttggagattgagtttacaaagtcacagatcattgctacaatccctaaaacctttttttgtgcatggtatgccttacagaagcattggctagcaaataatatattagatcttgctttctatatacangaaattaaaatactctctcttaaatctttcaaaactaatactattctcttaactaaactctgtatttataacattttctaaattttcttcactccaatgataatcancattacaaaatcatgtaatactccaataaatgctttattccccaccgcaaattctacaaaaccatgttcaatacttanacttaataacattattatccctaatatctgtatacctttaa

SEQ ID NO: 13942 - DNA, 491 bp, Glycine max
  Coding DNA Sequence Number=SeqID_4163
atctcggctgcgagctggaaccggagcgttgccgcgctcgacaagctctatcgctgggctgtcgaggaaggaatcattgcgatctcgcccttcagctacggcgccacccttcgcagggccggcggtagccgcgcagtgctcgctgtgacgacgaaccgtgcccgcgagcgcgccgcgcggcgccacgatacccgttacatcgatcttggccgctacctgctgttccgcgaggtgggattgcgcggccggcttcccgacggctcggaggacgcgacgtggcgcggccgcaacggcgagcgcaatgcgttgtttgccgagcttctcgtcacgaccggcctgcggctgacagaggccggcagtctgctgctgagtgagctgccgcgcctgaccgatcccgaatcgcgctcggtgccgttcgatctccccggtccgatcgccaagggcggacgaccacggcgcatccgcgttccccgccgggtactgagattgat

SEQ ID NO: 13943 - DNA, 577 bp, Glycine max
  misc_feature (199)..(199): n is a, c, g, or t
  misc_feature (236)..(236): n is a, c, g, or t
  misc_feature (398)..(398): n is a, c, g, or t
  misc_feature (506)..(506): n is a, c, g, or t
  misc_feature (512)..(512): n is a, c, g, or t
  Coding DNA Sequence Number=SeqID_4164
tattccgcacgagatcacacaacatcaacgacaacaccatgataatcacagcacaaagagatggaggtcgtgataggatatcggagtagtgcagacaccatccccgtcgacaccacgcgcgggcggcctcgcgatgtagtgccgtgtctcgtacatacgcgaagcatgagagagatgagtagcattgtcgtcgagagangaatagagaatatttatttgggtggtatgttgtgttngtatatagttgtttttttgttttgttgtgtttgatatgatggtgagcgtagtgagttggtgtgtggcgtgctacatataagtagatgtaacgtgggtcttccgaccacttgtttattggtgtagatgtgtggcgtactcactctctatccatcctactctancgacgacgggggttcctcttggtgtaacaacacccacagcagtacagttcatacatcgattgatcaatacaagaaaaagtgtgatgatacatatgtaggcacaccatngatatntaattataataaaactatatcaactccacatctatcaacatctcctccctagcatctataagata

SEQ ID NO: 13944 - DNA, 588 bp, Glycine max
  misc_feature (130)..(130): n is a, c, g, or t
  misc_feature (135)..(135): n is a, c, g, or t
  misc_feature (179)..(179): n is a, c, g, or t
  misc_feature (202)..(202): n is a, c, g, or t
  misc_feature (204)..(204): n is a, c, g, or t
  misc_feature (233)..(233): n is a, c, g, or t
  misc_feature (236)..(236): n is a, c, g, or t
  misc_feature (238)..(238): n is a, c, g, or t
  misc_feature (242)..(242): n is a, c, g, or t
  misc_feature (249)..(249): n is a, c, g, or t
  misc_feature (280)..(280): n is a, c, g, or t
  misc_feature (299)..(299): n is a, c, g, or t
  misc_feature (302)..(302): n is a, c, g, or t
  misc_feature (304)..(304): n is a, c, g, or t
  misc_feature (309)..(309): n is a, c, g, or t
  misc_feature (325)..(325): n is a, c, g, or t
  misc_feature (335)..(335): n is a, c, g, or t
  misc_feature (344)..(344): n is a, c, g, or t
  misc_feature (363)..(363): n is a, c, g, or t
  misc_feature (396)..(396): n is a, c, g, or t
  misc_feature (420)..(420): n is a, c, g, or t
  misc_feature (425)..(425): n is a, c, g, or t
  misc_feature (431)..(431): n is a, c, g, or t
  misc_feature (482)..(482): n is a, c, g, or t
  misc_feature (505)..(505): n is a, c, g, or t
  misc_feature (528)..(528): n is a, c, g, or t
  misc_feature (563)..(563): n is a, c, g, or t
  Coding DNA Sequence Number=SeqID_4165
actctgctgcagacgtgcgcatactcgaccgctcatagcgtcgtgaccctctctctcagctacccacacgtccgcgcgctgcgcgtcatgtgcgttggtcaggacgcatactgcgcactccgcgctatgntctgnactcgagatcgtagtgcactcgtcgcgatctcgccgctctgcancacatcatcatgtatgtcagtgntnctcgtcgtacgatgtgtcgacgtatgcanacncngctnatagttnatgtcgatcgctgcgtagcgatgacacgatncacacgatcacgacatgtnatntntcatnattattaagtgtctancgtatgtgantactagaanatcaatgtcatgtctcatntatcaatcgtacgaggatgcactacacatatgncagttcgtgatgaccagtaaccgnaggancgaganggacgtctctttgcgtctcatcgtgtgacgatcgactaatcacgctataantactgatccgacgctgcagcatnatgttatatacgtagtcgtgcangctcagcatgactcatgtgacgcgagagacttgtngcataaagctgatacgagtctgacg

SEQ ID NO: 13945 - DNA, 374 bp, Glycine max
  misc_feature (86)..(86): n is a, c, g, or t
  misc_feature (112)..(112): n is a, c, g, or t
  misc_feature (164)..(164): n is a, c, g, or t
  misc_feature (198)..(198): n is a, c, g, or t
  misc_feature (282)..(282): n is a, c, g, or t
  misc_feature (344)..(344): n is a, c, g, or t
  misc_feature (349)..(349): n is a, c, g, or t
  Coding DNA Sequence Number=SeqID_4166
caccaccacaaacatcatataacagatgacataagagaagttagcaaagaatatgtataggcagaaacgctgcgagcaacctgtanctgaacataatgctgactgcagcttngcgagagaatgagcgagacacgatactctactacataaacagaatatcatantgatcatatatcacgatatatcgcatctcaccgncctcctctcgtaactagtccatacatgcatactaggatgagacgcactcgttaaatagagcaatagattcccagaaaaattatncatagtatatatacaactgctacacgaaactcatcgatatgtattcataacacatcttgcancgcgngcgtgtctttgtaattgtactgctc

SEQ ID NO: 13946 - DNA, 589 bp, Glycine max
  Coding DNA Sequence Number=SeqID_4167
cattaacgcgccgagctagctaaacgcgaagcgctaatggcgatcgtttacgtgcttctggtggcgctgatcaccgcggcgtcccatgcgccgcacggcgcgcacggccagacgtggcacggcgacctcgcggcgctcgccgccgccggcaagctccgcagcgaccccaacgccaccctggcggcctccacggacttcggcaacatcacggcggcgctcccggggggcgtgctgttcccgtcgtccccggcggacgtggctgcgctcctacgcgccggggaacacaacggtggcgtgggcgtaaaaccatctcgttccgcgggcggggccaatccgtgatgggggcaggcttggccctcggcggcgggggcccccacatgccgtccctgggggggcccggcctccggggggggattcaacgtgggcggggaacggccaaaaatccacccccgggggggaacaaaaggggggatcaaccgcctggggttaaactttggaacgccggcgggggccccgcaagtcggggaacggaataacctccccctccaccggccggggggaccctctctcctaaggcccggaaattaag

SEQ ID NO: 13947 - DNA, 200 bp, Glycine max
  misc_feature (27)..(27): n is a, c, g, or t
  misc_feature (32)..(32): n is a, c, g, or t
  misc_feature (47)..(47): n is a, c, g, or t
  misc_feature (86)..(86): n is a, c, g, or t
  misc_feature (91)..(91): n is a, c, g, or t
  misc_feature (104)..(104): n is a, c, g, or t
  misc_feature (111)..(111): n is a, c, g, or t
  misc_feature (137)..(137): n is a, c, g, or t
  misc_feature (139)..(139): n is a, c, g, or t
  misc_feature (142)..(142): n is a, c, g, or t
  misc_feature (156)..(156): n is a, c, g, or t
  misc_feature (173)..(173): n is a, c, g, or t
  Coding DNA Sequence Number=SeqID_4168
aaattgtagtaaactcatcctaaattnttaangttctaagttctaanatgttgatgactacgtgaattcaaaaatcattttttttnttaancaactaataaaancaattgncctacaaaaaaatgagggggaaatancnttnttaattaaggctcncaatgcagggaagttanacaatgattttcattccttgaaatcat

SEQ ID NO: 13948 - DNA, 238 bp, Glycine max
  Coding DNA Sequence Number=SeqID_4169
cggcgtgaacaacccacaccgctatcgccccgataccgctgccccccgcgagagcacgaaataccagaacaacaccgacctcccgatcacgaagctcccccgccacagggtggctcgggcaattgctcaccacatccagactgagctgcgcgtccagagccatgcagtgctcgcatcccaagacactgcggaggcagaccatgcagcactcttagaggatactaacccgcgtgccata

SEQ ID NO: 13949 - DNA, 529 bp, Glycine max
  misc_feature (122)..(122): n is a, c, g, or t
  misc_feature (139)..(139): n is a, c, g, or t
  misc_feature (278)..(278): n is a, c, g, or t
  misc_feature (361)..(361): n is a, c, g, or t
  misc_feature (436)..(436): n is a, c, g, or t
  Coding DNA Sequence Number=SeqID_4170
cgagacggttgattggatagcttgatcacattactgatagaagtcgtatggggagacgatgggtgtgcttagtgtgggatatcgagggggaagaggaggtgggtcgtaattagacttatttntgcccacgccagatagncgtgtagttgttctggcggggcgagacggtgtacgcgggcgggagagcggcgctggtagacttgtgtgtgtggtgggctctggccctagcgccagtgtggtgtgtgttcgctctgtgtgattctattccctatgttcanggattcctgacgatgtgttgttaagataatagaacagtctgtcttcgcgcaggcgatcacagcagctcaatcgtcttgtgaancatatgaactgatgagacaagtcggcatgccgtacaggtggcagcacatgcccacgcaataccccgccgtcaggnctcgcggcggcgcagaccacgggtaggttccctccgacatctagaccggccctagcgagtccgtagaagccttaatcaggtagtcgggtgtca

SEQ ID NO: 13950 - DNA, 384 bp, Glycine max
  Coding DNA Sequence Number=SeqID_4171
gttttcttttgacatggagcgccctggccgatcacagccaccaccgcaggccattcaatgccacctccgcaggttgtctccagccagtcgtcgctgcccccggcgcctccacgcccagacccccttcctccgttcctcaaaaatctgtcaattcgaaagcctcaaaaacccgtcagttggaaatccgttcaacatccgtggttgataacgtccacgagctcctctgtgattagttccttcggtcgataatgggttgtggctccttggtgagcaaacctttcgtccctgttgtccagtcattgcctggagtaaggatgttgtgcatacacgtgcgtcagtgcactatcggctataacaaaagttgaagttcgtgcaaatgccaaa

SEQ ID NO: 13951 - DNA, 562 bp, Glycine max
  Coding DNA Sequence Number=SeqID_4172
aaataatttttcacactccacagcctaaacccaaccctaaaccacaaaaactataaataaataatgggtggctgtgcgagtagacccaaggagtcagacatgaacaacgaaggctctgttcctaagcctgtgtctgaaaacgtagtagccaaggagatcaacacagaagaaagcggtgagaaacaaaaccaaacagagaccactgaaacaacttctgtcgaagctaaggagacatctgaggtcgaaccgaccaaggaaacagctcctgctgctgaagcagaggttgcagcagccgtggaagagtcatcttctgctggtgaggttgcagcagcaactgagaaagtggagaacgtagaggctgcaacagaaaacgttgaggcggttgcggtagctgctgcacctgaaaaggttaaggccgaaccagtaaaggaagagaaagaagctgtcgtcattgtttgattggattaaagctgtggaaaatattttgaatgttgttgtataccaccttgatttgattttctactacctgatttaattaactggctttggttgttctgtgtat

SEQ ID NO: 13952 - DNA, 556 bp, Glycine max
  misc_feature (194)..(194): n is a, c, g, or t
  misc_feature (308)..(308): n is a, c, g, or t
  misc_feature (425)..(425): n is a, c, g, or t
  misc_feature (434)..(434): n is a, c, g, or t
  misc_feature (477)..(477): n is a, c, g, or t
  Coding DNA Sequence Number=SeqID_4173
acacttcttcatgccgcgtatgttgcttgcatatggtgtgacacaggtcgtccgatgttgtgatgttcggtcgctgtgcccatacagcttatcgcgcgacagtcctacacagcgagcctcggctcgctgcgctcatccctcacacagccaccgctcgtcaatgtactcgtgggtgtctgtcgcgtgcgaccccncgcactcgctacgcgtcgtgctgtcgccttcctctctcgttatctcattccggctcgtcgcactggcatccctctctgagaagatagcattggggctcggtcagatgagatatnagtgtgcgcgctcgtcgtgagatgtcgccacgagatcatatatagtgattgcgcacaatgaataacggtatgagtgtagagagagttggtctctaatctctgatgatgttactctgnagaaagcgntcgattgatagtatgtcttatgatcgtacaacagttcgagtantatatttcttgctctatctttgttgtttatgttactcgtctatcgtcctctgtgccgtgtgctagtgtatggtgtctca

SEQ ID NO: 13953 - DNA, 446 bp, Glycine max
  Coding DNA Sequence Number=SeqID_4174
aaagcccacctagcgctcagccacaagccagtacactctagctagctactagcgttatccacatagcaatggcgccctccaagctcgccctcttcctcgccatgaacctggccctcctcgtggccgtgcatggctgcgggtcgtgcggcaacacaccgcccgtcccagtcccaagcccaccgatcgccgtgcccccaccagctcccgtgccgtctccgccttcgcccggcggcgggggcggcacctgctcaatcgacacgctgaagctgaaggtatgcgccaacgtgctgaacctgctgaagctcaacctcggcgtgccgacggacgagcagtgctgcccgcttctgagcggcctcgccgacctagacgccgccgtgtgcctctgcaccgccatcaaggccaacgtcctcggcatcaagctcaacgtgccggtcgacctcgtgctc

SEQ ID NO: 13954 - DNA, 545 bp, Glycine max
  Coding DNA Sequence Number=SeqID_4175
caactgtttttggagccgcgggactttcttatctcgtgggttctttttatttagcaaatgaggtctctttctttggtgctgtgctttttgtttttgtaccatcttttatcgcaggaataggaatgagatttttcccccagttcatgcaaacttattatcgtccttttatgaaacaacatkctggacgattctcccaaacsaaaatatycccagaaggaggctcagaatccgaatacgaagaaatcaatcaatcagaagaggcaagawagagacaagagagagaagagagacaaaatcaatatggaagaagtaataggcagcaatctcagtctcaatcgaaatcgaaagatttatatgctgtgttaggtgttagtaaaaatgccactcttccagaaattaaaaaagcatacaggaaaaaggctatggaaaatcatcccgatcgaaatccaaataacaaaacagaagctgaacgtaaatttagagaaattaacgctgcttatcaagtgctaagtgatgatcgtgcaagggcagattatgatcgctat

SEQ ID NO: 13955 - DNA, 510 bp, Glycine max
  misc_feature (86)..(86): n is a, c, g, or t
  misc_feature (116)..(116): n is a, c, g, or t
  misc_feature (145)..(145): n is a, c, g, or t
  misc_feature (257)..(257): n is a, c, g, or t
  misc_feature (263)..(263): n is a, c, g, or t
  misc_feature (325)..(325): n is a, c, g, or t
  misc_feature (348)..(348): n is a, c, g, or t
  misc_feature (426)..(426): n is a, c, g, or t
  misc_feature (433)..(433): n is a, c, g, or t
  misc_feature (454)..(454): n is a, c, g, or t
  misc_feature (470)..(470): n is a, c, g, or t
  misc_feature (481)..(481): n is a, c, g, or t
  Coding DNA Sequence Number=SeqID_4176
tgctgatatctctgacgctctctacgctcttcagtatactgagatatcactgctctaattctatatatctattctgataacctatnctcctaattgcttcggtgtgtgatgtcacntctacgtgtcagtctacctgtatctccangtcagtgtgagcctcgtccgtgactcgtgcagtgcactcgttcgtgatcgctgcatgccctgcgtccgcgtcgttagcgacgtatcatttcttagtgcgctgcgctcgactnactctntctcgaccccgcctacgatcgtctgtcttgcagatattcaatgttctgcgtgcaccggggancgctctcagacggtcgggctcgnagtgtggtgcatgctgctgtatgtgctgcgcgtatgttaagggcgcgtgtctcgtgatgtatagatgcgactgctgtntgactcncgctcgcgctggtagtagtgngcactggaactagtancgctgagtttnatgcatacgcctatcgtctgtgcgtgcct

SEQ ID NO: 13956 - DNA, 211 bp, Glycine max
  Coding DNA Sequence Number=SeqID_4177
aatactcgagggaagatcttgctaacaagagtgctgatcttctgaggtacaaccccgtgcacaagaaggagcctgtgtgagtgcacgatgagaacacattgcccgagacacttattaatgaatgaaacatcaacgagacatggaaaagtaaatacctcgtgcctcgagacccttacgagagagctctggctcgatatagctctaaaacttt

SEQ ID NO: 13957 - DNA, 552 bp, Glycine max
  misc_feature (59)..(59): n is a, c, g, or t
  misc_feature (155)..(155): n is a, c, g, or t
  misc_feature (205)..(205): n is a, c, g, or t
  misc_feature (255)..(255): n is a, c, g, or t
  misc_feature (306)..(306): n is a, c, g, or t
  misc_feature (334)..(334): n is a, c, g, or t
  misc_feature (353)..(353): n is a, c, g, or t
  misc_feature (364)..(364): n is a, c, g, or t
  misc_feature (425)..(425): n is a, c, g, or t
  misc_feature (470)..(470): n is a, c, g, or t
  misc_feature (477)..(477): n is a, c, g, or t
  misc_feature (480)..(480): n is a, c, g, or t
  misc_feature (488)..(488): n is a, c, g, or t
  Coding DNA Sequence Number=SeqID_4178
atatacaaaacaactgcgactcctcggaatgatacaccatcacacaatccaccacacanctgtaactcagtgcgggagaattacgcgcgcagagcgttgtcggacaatgctatatcagcatatgctgctgagatactcgctgcatatatagtggnacagcgagccgaaaagcaacaaatagactggacggaaacatctagcacgnaccatatcgctgtgtataatgtatggcgaggtcaacacacgacacaatantacgtctcgatctgctactctgctcggtcgcctgctatctcctgcgcgaanatacacatacgagagcgaggtgagatcntcggtcgcactacatatcncaattctgcgngttaaaaataataacgttgctgtacgcgtctcacataatacaatacttggagacatatcangcatcacatacacacgcgacaaggagcagcgggatgactgcgagngctaacnaancggtcganacactcactcgctacatgcctcgcagcagagtggaggggatgacaacatatatgccgcgcacac

SEQ ID NO: 13958 - DNA, 519 bp, Glycine max
  Coding DNA Sequence Number=SeqID_4179
gaaggtaaagttcgctcagaacacagagagtggcgagagtgttgccatgaaggtgctagaccgtagcgccatcatcaagcacaaaatggtcgaccagatcaagagggaaatttctatcatgaagctagtcaggcatccatatgtcgttcgtctacacgaggttctagcaagccgtactaagatttatatcatattggagtttattacaggtggtgaattgtttgataaaattgtaagccatgggcgtcttagtgaagctgaatctagaagatacttccaacagcttattgatggtgtagatttttgccacagcaagggagtttatcatagagatttaaagcctgaaaatcttttacttgattcacaaggaaatataaagatttcagattttggtttgagtgcatttccaggacagggggtcagtttgcttcggacaacttgtgggactccttattatgtagctctggggtactcagtacaaggggttattatggggcttcaccagatgtttggtcgtgt

SEQ ID NO: 13959 - DNA, 579 bp, Glycine max
  misc_feature (192)..(192): n is a, c, g, or t
  misc_feature (236)..(236): n is a, c, g, or t
  misc_feature (456)..(456): n is a, c, g, or t
  misc_feature (542)..(542): n is a, c, g, or t
  Coding DNA Sequence Number=SeqID_4180
cgcaaaggacatatcgttcggcaaatatagaaagcattctctgcatacaccgctcagcatctcccattattttactggcgattaaactactcgagcagctcagtcatatcactccttctcttacacagcctccgcgactagcgagctgtacgagtctgcgacgtcattgtatgtcgagctaccagactatancgattagtacacagtgttatatcaccgacagccccacctcgcangctctcatgtatatgtgtgtgttctcacccgcagagtcggcatacacacgtcatctcgtgtacatcgatgatgatactctacagagcatcgacacgatagcgcgcttatatatatatgatgatgtatagctcgaccgatcgcttgtagtatatgggcactgactattagatacacagagattagttgtatgtgcgtgtatagacagctggcatctgcgcncgactgtacgagactctatgcgtcgtcacagactggacacgtcgtgaggataggtcctgatgatgagagagacgacgacggtgagnagatgcgtgacacgttgggtgcgcgtcttgtgatcaa

SEQ ID NO: 13960 - DNA, 530 bp, Glycine max
  Coding DNA Sequence Number=SeqID_4181
attttcctcagtcatgatctcctaacagttgccatgctgacaaaaaagatattaacaagagctctgaatatagcttgagctatattaacaagatcatcaaagacaaatggtacagtttacattaagtgcaatttcctttgtagctctgaatgtaccaaaatagtacattatacctgcccctacacatttttttggggaatacagtgaactttatataaacctgaacatttcatcacaaatcgaccaaaaggaaagactgaaagcctttaagtgtacgagcaaatgtgctatctttaacctctttgatttgtcaaatccaatggatgcttccaagttccaagcaagacgtgtcaagggtagttcagtagacagccaattcttgaaacaggcatgaattttgttatgtggtctcaatcagacaaaaaaaaaccagtaaacactccaaaatatgttgccgaaaaatataccaaaataataaaactaagaacctaaaactcctaaaaataaaatgcattcgaattcctcaattg

SEQ ID NO: 13961 - DNA, 484 bp, Glycine max
  misc_feature (84)..(84): n is a, c, g, or t
  Coding DNA Sequence Number=SeqID_4182
gtcatatgtgctaagagtcgctcgtaagtcacagaagatgcgcgtgcacacctcgcggcgacgacgagcgaccatacgaaatanttataccctctctacatcgtctaccgttctgactgctgtaggagttgtcctcacctcatgaattcagcgcgacgagaatctatagtcgatctaggtgcaggcattaacatgttctccggtagatcgtactacacattagatacacatcagctacataatatagcgacaggcagcgcgcaccaagtcgcgtcagacgacacaatcgaccgtccacaagacggcacctatctccgcgccgatataagatatgtagccgcgacagtccacgcgttgtatcgtcggcgctttacaagactgtccgttcggcgtaaacactacgaccacgaatatacaaagttcgcgcggcagcagaccgccgtatcgtctctagcgctctcaatagtattcatcgcctacacca

SEQ ID NO: 13962 - DNA, 460 bp, Glycine max
  misc_feature (188)..(188): n is a, c, g, or t
  misc_feature (363)..(363): n is a, c, g, or t
  misc_feature (397)..(397): n is a, c, g, or t
  Coding DNA Sequence Number=SeqID_4183
gatagtatacgcctcaacaaccaatacaaccaaacaacaataacgcctagctctaattacactcatgtcgataagtgaagagtatctcgtgattcttatagtgtgggtagtattggtagcgcgcgagcctacatgtagcggtatgcgcgtgtattactgcgagtggccgaccagagagaggtcgtcgngttttgtatacacgttgcgtcggtgtggtgtattgtatactgttcgtttctatcttctagatagcttcacatctccgctgcaagcgtaggtacatgatgggaaaagtgagaggctgagtacaataacttgcgcgaaacactcatgtgtagctcggcgtcatatctccgtaacatngctgggcgaagataaaagcaacagtgcctctacngaggtgtgagagtgtaaggcagtgtagtgggggcggtctaattctcctctcaatagcgcgtgt

SEQ ID NO: 13963 - DNA, 444 bp, Glycine max
  Coding DNA Sequence Number=SeqID_4184
atgccggcctggaccaaaggttggtgcagggtcgaagagaccatcaaccaggtcgcctgaccatgaaagggtctctgagtctccatcctctctagcctgcctagggctggaccagtttggcactgctagatattagctagctagcatcggttcataagggggtgtgaaggccagagggagcccaggccagcaaggagacctcagataccaagaagaacggaaggtgaagaagctcatcaagatcgctgatggaagacggcagggctttgaggaggatgtctatccctacccgcagaagcagatctgccgatttccacaatttttcagaaaggaggagacgggataagatcaacgagaagctcaaggcactgcaagagctacttccaaactgcaccaagacggacaaggtgtcgatgctagacgaagcgatcgactacctgaaat

SEQ ID NO: 13964 - DNA, 561 bp, Glycine max
  misc_feature (266)..(266): n is a, c, g, or t
  Coding DNA Sequence Number=SeqID_4185
ttaggcatacaatattgtggctcatatttactaaatagtaaggtggggcattaaccaatccatttcctttctttggtgcatacacataaataatcgctagcttgatttattgttaggatattaattatggttcagcctttgtaattattttattattttattttgaatcttattctcgtatattaagaacatatttataagaaagcatgatcaggtaataaacaaccttttagtatgtgagaaagaaagaatagcagttactttcngccggcgtcgcacgggagtggattgtaggcccagtggcagttttctcactcggctcgtgtaaacgaggtagcagttgatctgcgcgtgggttattgcggttttttttgtagatgtgtctattaatattccttcatttaatatgttttatgacataatttatttgtctttttgttttaaattcgccgcggaggggggaccacgcttatgggcgcgctggttactgttgattcacgtaaaagaccatctttcgcaataaaccagaagaagcaagcgacgcgggcacaaaccaaggaa

SEQ ID NO: 13965 - DNA, 503 bp, Glycine max
  Coding DNA Sequence Number=SeqID_4186
ggaatcacaatcttctcatagctcgagttaagtccattgttgtcattgcctctctttgtggcaggaagcctaggggactttaactttggagaaaccgggggtgtcaatgaggtcttccttcaaagtggtggtgatggtggacaaattgactttggtggtaccactttcttgattgaaatcctcctctcaaggttttgaacgcgattacaagttgagttggagcactgcccttccattcattttatccacttaggactttgcagcacccacctctaattgtgaactctcattcccttctgtattagcgctccaccttatgttatatttatattcctagttataatagatttttcatatctaaaaggttatgttaacaacaaagaaaatttaccagtaatttatatacgaattcaatcaaaatatttcatctttcaggaaaaacagccacgggggatcccctttttcgtatgcctccacctccgcgtcgtaatcccatttgtggg

SEQ ID NO: 13966 - DNA, 262 bp, Glycine max
  Coding DNA Sequence Number=SeqID_4187
gaactgcattttgattcttccctccgccttcatccatagacctggcctccgtcacttctgcagccgttgtctattccctcattgcactggcctctcaaaggcaagcgcaggcaaagtgagtgccgccgcagtttaaagtctcagctccccaagccacaaggttctgcggcatcaaggcttccctcaaagacgttggagtcgctgttgtggcctactgccgcgagcgcagtgtctggctagcaacgccttggccattgttgtc

SEQ ID NO: 13967 - DNA, 520 bp, Glycine max
  misc_feature (66)..(66): n is a, c, g, or t
  misc_feature (90)..(90): n is a, c, g, or t
  misc_feature (98)..(98): n is a, c, g, or t
  misc_feature (212)..(212): n is a, c, g, or t
  misc_feature (234)..(234): n is a, c, g, or t
  misc_feature (240)..(240): n is a, c, g, or t
  misc_feature (277)..(277): n is a, c, g, or t
  misc_feature (284)..(284): n is a, c, g, or t
  misc_feature (286)..(286): n is a, c, g, or t
  misc_feature (289)..(289): n is a, c, g, or t
  misc_feature (293)..(293): n is a, c, g, or t
  misc_feature (410)..(410): n is a, c, g, or t
  Coding DNA Sequence Number=SeqID_4188
atcgccgcgccatcttgtagacggtgtcgtcgttgcggctgcgcgcgcttgatagcttctgttctnctgcgcccggcgtcgcggcgcgcncttgctgngtgtgcgctctcgtcgttattttcatgtcattgaatatatccatgtatgtcctttttatattatatattatctgtcaagtagagatgatgtggtgttgtgatgttcgttgtcgnggagatgtgtatgtgtcacacnatgtgnggtaggagagccgagcagaaagagggagtgacacagntcgtccntnttnaganttacacgctctagacacagacacacatacagcgccgcgccacatcgtctgcccctctctcttatttgctgctactgagcgcgtgcacgacatgtggtagaagaagaacagaatatanatatataccgatgatatttatcttacctagcttcactctatcgcatccctctcctactcttccatcgccgcgcgtcgtcttctccgtgcgtacgatcacctccagcacat

SEQ ID NO: 13968 - DNA, 548 bp, Glycine max
  misc_feature (181)..(181): n is a, c, g, or t
  misc_feature (209)..(210): n is a, c, g, or t
  misc_feature (223)..(223): n is a, c, g, or t
  misc_feature (227)..(227): n is a, c, g, or t
  misc_feature (243)..(243): n is a, c, g, or t
  misc_feature (256)..(256): n is a, c, g, or t
  misc_feature (264)..(264): n is a, c, g, or t
  misc_feature (319)..(319): n is a, c, g, or t
  misc_feature (351)..(351): n is a, c, g, or t
  misc_feature (355)..(355): n is a, c, g, or t
  misc_feature (377)..(377): n is a, c, g, or t
  misc_feature (515)..(515): n is a, c, g, or t
  Coding DNA Sequence Number=SeqID_4189
gatacacgacgtaatccacactacatcactctcacatagtctctaaatataatgctcacactaaatactaaccatatatatacgacatcatactctaacactattactaatccataccaacatctgatatcatactccaatctatatatccattaatcatctctcttatccctttctatgnatagacttgcataattcttttagttagnnaagtctgtatgtntatnctcatctttgcggtanttatgcatctatntatcgagngagatgatcgatatatactgtcgctcatggtattattatggtatttactatcatnatgtgtaattcatttgttttctgtgatctgtnattnttactgtatcccctcgatgctncaacgaccgactaactcaccaagctaccagacaccttcctcctccacatactctcaacggacacatacactcctcaacctcacatttatctcacgtacagctatctctctaccacaatcacacaccgagttcagaacnactccaccacatgtatatctaacactacccagc

SEQ ID NO: 13969 - DNA, 489 bp, Glycine max
  misc_feature (145)..(145): n is a, c, g, or t
  misc_feature (315)..(315): n is a, c, g, or t
  misc_feature (333)..(333): n is a, c, g, or t
  misc_feature (414)..(414): n is a, c, g, or t
  Coding DNA Sequence Number=SeqID_4190
cgccgagcacgaattgatattatgaccagagttattattttctgcgccacgccagaggatatttttgtttgagacgccgccgcgaggtaatgagttgggtgttggtattgcaccatattaattattaatacgcgccaccttgtancgagccgcacagcccagcgcaatcaatatcacaaatccacgacaagtagagacagccgtggtttgatgaacagaccagagcagaagatatatataaatggacggcggaggtgcaaaatacagacgattgcacggtcgatgctgtccgagagagagataataggttagctnggcagccctgatactagncgggccggggcggggtttcgcgccgatgtttatagatcgccacatttatataataggcgcacgacatataagagcagcagncgcaccccccgcgcccgggaggtaccgcaccacgcacacttatttgtcgcctcacgacgctctcgtagttttggg

SEQ ID NO: 13970 - DNA, 475 bp, Glycine max
  misc_feature (107)..(108): n is a, c, g, or t
  misc_feature (132)..(133): n is a, c, g, or t
  misc_feature (168)..(168): n is a, c, g, or t
  misc_feature (189)..(189): n is a, c, g, or t
  misc_feature (233)..(234): n is a, c, g, or t
  misc_feature (242)..(242): n is a, c, g, or t
  misc_feature (272)..(272): n is a, c, g, or t
  misc_feature (292)..(292): n is a, c, g, or t
  misc_feature (303)..(303): n is a, c, g, or t
  misc_feature (379)..(379): n is a, c, g, or t
  misc_feature (381)..(381): n is a, c, g, or t
  misc_feature (384)..(386): n is a, c, g, or t
  misc_feature (391)..(391): n is a, c, g, or t
  misc_feature (393)..(395): n is a, c, g, or t
  misc_feature (398)..(398): n is a, c, g, or t
  misc_feature (440)..(440): n is a, c, g, or t
  misc_feature (442)..(443): n is a, c, g, or t
  misc_feature (445)..(445): n is a, c, g, or t
  misc_feature (447)..(448): n is a, c, g, or t
  Coding DNA Sequence Number=SeqID_4191
gaatctgcacatgtcagtcgcaggtatgcgatcgtgcgcacgctcctctctcatactctttcgctctcacatataactactctcttactctgcgcagtgcggttgtnncgatatgatagcatgtagatgtannattctctactaccagtatgtatcttatataagtangatctatcataacgtcctgtngtctcgctacgtctactcactacatacgcatcgatatcgtggtnngctgatantgccgtcccaccacatgtcgctagctactntgcactctgatcagcctagnagtgtggacgncgcgtggctacaccacgtatatattttatctgtcctcactgcgacgcactcactatactctctcacgacatcatgntnttnnntgctncnnnctncccactctactcagtctgtgattattccacacatcagtactncnntncnncagatgatatgctactatcatctgtat

SEQ ID NO: 13971 - DNA, 497 bp, Glycine max
  misc_feature (205)..(205): n is a, c, g, or t
  misc_feature (229)..(229): n is a, c, g, or t
  misc_feature (232)..(232): n is a, c, g, or t
  misc_feature (344)..(344): n is a, c, g, or t
  misc_feature (439)..(439): n is a, c, g, or t
  Coding DNA Sequence Number=SeqID_4192
acgcggtcgccgaaagcatacggatcatatacaacgcgcagtgtgatatagtatgtattatatgtatgctattatgtgacaacaataatctcattagtgtacatatcactatcttctttattcttctatttactctgctcatcctcatcgtattatatcatacccacaacactcggacatcatgtatatcatacacaaccatcgntctcggacatgtgtcgtatgtatntgnggtgttcatttgtgcgggcagtcgctattagtcgaccctgtatagcgagcgcgtatgcaaaccctagtgccatgtgtctctttcactcatacatcctagccatactcatccngaccggcaacatctacactacctaccctaccacacaccgtcgcggagaagtcatatagacattttaacatatcgtagagcttgtttgttgtgtgntctgtccacatacttaatcatacacttagtttcatataaacctcttacatctcactcg

SEQ ID NO: 13972 - DNA, 564 bp, Glycine max
  Coding DNA Sequence Number=SeqID_4193
gtttctcagaatcgtacctataaatatggatgtcgacttccatggctctcaccactgcaatctacattccgttcttcactatttctctctctggaattctgtttacagcaaaagacattcacaattcctactctttcaattgcaacacgaccgagaaagtaatgacccgttctgggaagcgcaaaaagtaaaaaaaaatggaaaagctaatcagcgccgccatgctcacgaacgacaaggtagttgttttaattaaatagcgatcttgagaatattgagtggacaccttcatatttgacttttcagatgaagtttgggctgagttagtgacgtaaccgttgccaaccaacacgctggcgatgtcttcgttgtttccgaacagggacgagaggagagagaggtatatctgatggccgttgctgccgagaggtgggaaccagtggatcgccggcggagacggagtggattgtgcggctgtgttagagtttgtttagaactacgccgttaaagattgagaggacagaagacgataagatttgagtggacgacatgttctctttaatt

SEQ ID NO: 13973 - DNA, 597 bp, Glycine max
  misc_feature (56)..(56): n is a, c, g, or t
  misc_feature (275)..(275): n is a, c, g, or t
  misc_feature (428)..(428): n is a, c, g, or t
  Coding DNA Sequence Number=SeqID_4194
actgttctagtgatctcgtagtgcacaggcacgcgtcatccctattcatgagtgtntcacttgtaagtagagcgagacagcacataccgtccaccgtgactgacctcatcatcattatcctatgctaccttccgatcacgagcgctcagtatatcgagacgtgttcagccatagctatcagatcatggcacttatcactacattaagacgatttgcctcacgtcctctgtgtcgtgtgaaactgcctgtctgctcacagagcattgacgttctancagatctctgcctgcgtatgtgatactgctgttatatgccatctccgcgatctcagatcgcataatcgcatacgagacaagacagtattatctcctccatatattacatctccacttcacgttcgacgcgatactacgtacacacaaccagangataacagagcgatcactagtcctcaccgtagtaccttctctcatggtcgtgatccatccatatcacctctctaatatcagcgatatggcgcgcttatatccgtgcttacgaaatcgcgacgcacttccataatatcgtgtcacagtcgagcactgataccactgtcta

SEQ ID NO: 13974 - DNA, 478 bp, Glycine max
  Coding DNA Sequence Number=SeqID_4195
aactcgtaattcttttgcatctttgagattctgaagagacaaagttagaaagtgactaccactctgatagcagagggggcgtcctctagggcagctttataaagctaccaattatgatcaaccttacagttcttatcaaaatccgcgtgcccatgctccaactgtgatgtgtatgattctcatagcgattcaagagacgctcgcgcttttacatcctagcctcacgattcgacagacaagcctcacggttctacatccgaagctccgcgttctcaagcgtagcatcacgcctcttcagatgcaagtctttccctcgtcgcattacgcttctcaaggcatctatcagggcagatgattcgcatggtgattcggcagcaataggactgtcatacttggaacgttgtaaaatctgttcagattgatcctcatcttccaggttccttttggacctcggggaatccacctcaagatgactagc

SEQ ID NO: 13975 - DNA, 224 bp, Glycine max
  Coding DNA Sequence Number=SeqID_4196
aaatccaaaaatccttgtctcaaagatgatctaactctaaagaataaatgcatatactacatgtctattgcatcgaatgcttttttccccccccctggcgggggggagggaatgaacctcagaccgccgcctccccaaactacgcctctacattttctgtcggccttccccgacgttattcgaccaccgccttccaacttctcccggtttcaaaattgacctct

SEQ ID NO: 13976 - DNA, 548 bp, Glycine max
  misc_feature (57)..(57): n is a, c, g, or t
  misc_feature (357)..(357): n is a, c, g, or t
  Coding DNA Sequence Number=SeqID_4197
gggagaccagcactcggactagatatgcgcgctggagctggaaagacatacataacncacccacacacaaacacactcctccacactccctccatctcttttagtgtgttatgaattcatcgcttctctccactgatactatctattacatacaatatgagtcatggtccagtcggagcgcgacgcgcaacgagtagagcagcgcgtatacacagattatagaatcacactaagagtgtcgtccccacccacctcaccgctctcccacacgcgcgcatccacacgcgacggcatccgcgatagatatgtatcttgtcgaactgcgcggcgcggcacgtcataaagatgcgagcgtgngcgggtagacgaaaaataaacagacacgacccttccacgcgcgatagtatacgagcactagagatatgtggacattccgtggttacacactcgctcgaacataatcaatcatattcaaccgccacaccgtaccctaccagctagcgcgtggcgcggcgcgcgcgcaaatacacgcgcaggttgcgttatcc

SEQ ID NO: 13977 - DNA, 501 bp, Glycine max
  Coding DNA Sequence Number=SeqID_4198
gtgtgcgtaccatccaaagcgagatcaacgagctcaagaaacaggttaagccaactcctgtttctcccgatggatccacggtcgttgactcttcgtcgcctccttctgccacggagcttgagatccgacggttgacggaagagaggaaagagttggtcaaagggtcttacagagacaaacactttgacgcaggctctgttttgttagggtttggtgttttggagtctgtgtttggtggtcttaacacttatcttcgtaccggtaaactcttccccggtcctcatctctacgctggagcagggataacggtgctatgggctgctgcagctgctttggtgccggccatgcagaaagggaatgagacggcgaggaatctacacattgcgttgaacggtctcaatgttcttcttttcatttggcaaatcccaacaggttttgatatcgtccttaaggtctttgagttcaccaaatggccttaaacccttcacttgttgtggtctc

SEQ ID NO: 13978 - DNA, 265 bp, Glycine max
  Coding DNA Sequence Number=SeqID_4199
tggcatgatattccccgtatgccctatcacttatcaagagccgcatgactctcaacaacgaggacgaagacagtggccccaagaccgttaccaataagtacatcgcttcacagagcgagagttgatcgcactgcctactggtgttgcatggttgatgtacaacaacgacaacacctctcttgttagcgtttctattattgacaccaacagctcgcactaccagctcgaccagatgcgtatgacattctatcttgctgcgatccaa

SEQ ID NO: 13979 - DNA, 512 bp, Glycine max
  misc_feature (441)..(441): n is a, c, g, or t
  misc_feature (467)..(467): n is a, c, g, or t
  Coding DNA Sequence Number=SeqID_4200
atgcagtgtgcattcaacgtgtggcactaccgtgtttcgaagcctcgctagcgaataagagcaaaacaattagccccttttctgtgaatattgctagaaggaagagaagaagcagtggcgtgaggtgcagcctcgttgacttcatcggaggagacctggtgaagccagacatcggtcgttggcttgaggatgttgaaaagcacaaggctattgccatctacactcctcatgaaggtggatacgaaggtaggtatcttaaccgtcttaaagaacaaggctactactttcttgacatctctgctcgaggacttggtgatccagagaccacactcctcaacccctaccctgtttgccctgctcaccttgggaaacaacctatagcaaggtggtactatccaccagaagttgactacagactctctgctcttcctcctagtgccnagggacttgtggtctggatcatcgangcgaaggtcctatcaaagtctgaactccagtttctagctttgctt

SEQ ID NO: 13980 - DNA, 406 bp, Glycine max
  misc_feature (368)..(370): n is a, c, g, or t
  Coding DNA Sequence Number=SeqID_4201
ctctctgtgacgctgattggtccacgataggaggctgcctctcctctccctatcccctcgctgccgctcgctcttctctgctcttccagacgccgccgccgccgcctcctcctcctcctcctgctgtagctcccacccgacgccgtcctcccagcggatccccgtcgctggcttcctgcgcccctacccctacccctaccagccgccggcttccccgaagtgctcacacgcccccctccgctcccggactcgccgtccccgtcgagtcgagcagagtcaggtgcacactggtttcccgatggccggctccgaggacgtgaggggtttggcagcatccctgggagagctacacgtggaggcatcaccannngcgggaggaaggaaccaatgggcatggcaatggtga

SEQ ID NO: 13981 - DNA, 504 bp, Glycine max
  misc_feature (57)..(57): n is a, c, g, or t
  misc_feature (91)..(91): n is a, c, g, or t
  misc_feature (111)..(111): n is a, c, g, or t
  misc_feature (133)..(133): n is a, c, g, or t
  misc_feature (165)..(165): n is a, c, g, or t
  misc_feature (169)..(169): n is a, c, g, or t
  misc_feature (210)..(210): n is a, c, g, or t
  misc_feature (215)..(215): n is a, c, g, or t
  misc_feature (234)..(234): n is a, c, g, or t
  misc_feature (277)..(277): n is a, c, g, or t
  misc_feature (280)..(280): n is a, c, g, or t
  misc_feature (293)..(293): n is a, c, g, or t
  misc_feature (297)..(297): n is a, c, g, or t
  misc_feature (300)..(300): n is a, c, g, or t
  misc_feature (328)..(328): n is a, c, g, or t
  misc_feature (332)..(332): n is a, c, g, or t
  misc_feature (349)..(349): n is a, c, g, or t
  misc_feature (354)..(356): n is a, c, g, or t
  misc_feature (358)..(358): n is a, c, g, or t
  misc_feature (361)..(361): n is a, c, g, or t
  misc_feature (363)..(363): n is a, c, g, or t
  misc_feature (378)..(378): n is a, c, g, or t
  misc_feature (403)..(403): n is a, c, g, or t
  misc_feature (412)..(412): n is a, c, g, or t
  misc_feature (419)..(419): n is a, c, g, or t
  misc_feature (422)..(422): n is a, c, g, or t
  misc_feature (435)..(435): n is a, c, g, or t
  misc_feature (441)..(442): n is a, c, g, or t
  misc_feature (444)..(446): n is a, c, g, or t
  misc_feature (468)..(468): n is a, c, g, or t
  Coding DNA Sequence Number=SeqID_4202
tattgacactcgctattacctgatcaatcgggtactctgtcgatgtcggcactcgtncgtgtgtcgtgctctagtgtatcatgaccgcgantcatcatctgactgtctctnggtcgtatcgcatactgcgatntcatactcttgtcggacatactgtgcctgcgnatgnttcgtcgcgtgcggttcgcccacgtgacgacatagagtgangtgcngactctcccgactagatangcgatgcgcacgtcggtgagtgagctatatattctcgcgcgtnggngcgtctcgcgcgncctntcntcgcgccgccgcggtgctgtgtgtatangagnctaagtcttccgcttcnatgtnnntntgntntcactccccccgacntatactaccctcgctagtgccgctngtgtcgtgnggtcgtngtntcgcgctgcggcnatgtgnntnnncggggcgggcggcgcccgtctnctatcgtctgctctagcagatgtcgcgtcgtacacg

SEQ ID NO: 13982 - DNA, 543 bp, Glycine max
  misc_feature (274)..(274): n is a, c, g, or t
  Coding DNA Sequence Number=SeqID_4203
tcgtccacccgtattggtacatcaacctcccatcttatcgccagtcgccgtcggttgcgtttgccgtctctctctccgctcgaatgtttgtgcgcgcagggagcagagggtggcggcgcgccggggggccaccctcattaccaccgccttcgagagagcccgccatctatcaaccaccccgcacacaccacccactccagctcgccgacggtgaacctccaccctccaacgcacccccctccctgcatgaacacgacaatctgtgatctcgatntgtagagatcccgtgaaggcgccgggagtgtcacagtgcagccggatgaagagtgaacatcgccaaaccatattttctccacgactctctgttcatctcaccacaaagaggtgtgttgtcttcacactcaatcacactctcttctctgtctgacgtctatattttagaacaagctggtgggagtgtattgtaagtgtgtgtgttacataagacacgtgcatgtctatatatgttgtacatactttcgtgtctctacttggtgtatacca

SEQ ID NO: 13983 - DNA, 310 bp, Glycine max
  misc_feature (41)..(41): n is a, c, g, or t
  misc_feature (140)..(141): n is a, c, g, or t
  misc_feature (268)..(268): n is a, c, g, or t
  Coding DNA Sequence Number=SeqID_4204
gaacgatcgcattccacaccaacatcctctatcttcccagncagtctttcgtcgcgccgccggttggtctctcttcttgtgatatccactcacgctcacgtttctcacccactcattctgttcctctctccactctccgnnccgccgcttcccctcgcgatctgtgcgacgagccagtggtggggagaccgcgcgagattcgcttggtctattatggcgtgcgccggagcgggcgacagcctcacacgattatgtgtgagacgccgcncgacgcggggtgatgacgacgtaacgtgtgtgacacccgtaa

SEQ ID NO: 13984 - DNA, 574 bp, Glycine max
  misc_feature (57)..(57): n is a, c, g, or t
  misc_feature (366)..(366): n is a, c, g, or t
  misc_feature (375)..(375): n is a, c, g, or t
  misc_feature (450)..(450): n is a, c, g, or t
  misc_feature (471)..(471): n is a, c, g, or t
  misc_feature (517)..(517): n is a, c, g, or t
  misc_feature (519)..(519): n is a, c, g, or t
  Coding DNA Sequence Number=SeqID_4205
gtcgccgatccaatcgataataactatactccacgcccttcgcgcgctcctcacctncgcgcgtcgccactcccactgctcctcctcgccgactccagcgcctcttccacgcacgcgcgccccgcgccgctgctatatactgcgctgcgcgccgtctcatcctgcacagcgtatccgtaagcgcgatgcacacacagctctcctacgacgctctagcagcgcgctccccctgctctctcctcctatctctctcatcgccgctcatctcacttccaacagtcgatctcacaagcgcgtcggacagacagagatgtcgactatattttgccgcgtagcgcaagagaacaacgcatcacacataagctntactattantatacacatagctgagtttatgcgtatacgcatcgtcgtcggtcatcgacactcgcggtgagcaacacagcgctncccactctgcgctcctctccncgtctttctgttgtgcaagccagctcgcgtctgcgcggcgccgccngngcagagagcgcgcgcggcgcgtgcgctgtcatcattggtgtgttctctatgcgcc

SEQ ID NO: 13985 - DNA, 458 bp, Glycine max
  Coding DNA Sequence Number=SeqID_4206
acgtacgatacactgctgttggctctttctatggatggaagagtagaggagggtgagtcaatttggaatactatctttcacacttatacacgctcagtgtgcacgaggtggttctctcggatgatccagagtttcaccacgcgccatatttcagacaaagtgttggagatatatgctgacacggaggaattgggcgtgcgtccacacgaggatacaccacgaggagtcgggcgagcacttgcaccttcagagcaggaagataagcagaagcctgtcctcgaaaaacactcgaagaagtggaagtgcatacacttcaatggtgagcgtgttcgtgtgcggagggcagagcctttggcctagcaaacgtcttctggataggttcggatgaacaaagagagtctcctctcctggacatatgtgatagctatagttcttccgaggtcctatgcgagcatgtc

SEQ ID NO: 13986 - DNA, 577 bp, Glycine max
  Coding DNA Sequence Number=SeqID_4207
caacatgtgtctgacgcccgagagccgccaggccgcgggctagcggtccgtccaatatatattaatctcatcgcatcttagaaatgctagcgttttcactgactaaacgtgtgctcgcagaacatgctgacgcccgccgcactcgtaccagacatccacgctaacaacaaaaccatctagacgcgtatgtgtagtcgaatcactgtctcgcgagacttcgtgcgcgagtgcattcgatacttacacgcgcttgtttaggacggccagaagtggatactccactatatacctcatcaagtacggtaccggcagtcggtggactgtgtgcctatacgattgtccgatgtatcctcactcttcttatcgccacctatatctggcgggtagaaaacatgctagatcactcatagatgcgagcgcggcgaaaaccaaaaagaatagacatagttgagagcatcatatttagtggggaaaagaatctagtgaaagaaaccactcctccgttgggggaaaaatctttgtgaggtgctcccggcgccgaactctccacgctatacacctgcgcagcgttgtggtc

SEQ ID NO: 13987 - DNA, 574 bp, Glycine max
  misc_feature (75)..(75): n is a, c, g, or t
  misc_feature (240)..(240): n is a, c, g, or t
  misc_feature (434)..(434): n is a, c, g, or t
  Coding DNA Sequence Number=SeqID_4208
ttactcactcttctccattagtcatcgccactgctcttatcctttccaatactccgccatctcgtgagccttgcntctgatatgccaacatccgacatctatcaactacacatcgtatcctatcacctcacttcactgctcattactccaccgctccgtccaacatatacccccctctactcccacctcacacattacctatatcactagtacgattacacaacctatcactcatacttnacctccacctccactagctcctacctataatacctcgactcactacttgcgcgccctgatttgcagacaataactcatataccactccacatccacctatcctctcagattatctatccgacctcccctcacccgcctatctcaactccagcttccgactcattcacctccacatcttagacaccctctgtatnctcatcctctcttatctaccataccatataatcttgctcacctatcagccaatatcatcaatatatttcacaagtcatatctcgccataatatttatctcatgcactatctcaggtactcacacactcatcctatatata

SEQ ID NO: 13988 - DNA, 571 bp, Glycine max
  misc_feature (143)..(143): n is a, c, g, or t
  misc_feature (409)..(409): n is a, c, g, or t
  Coding DNA Sequence Number=SeqID_4209
tagacgcctgtcacagtatctctgatctttcgccagaaatacgagacggcaccatggcaccgtacgtatacggcaccgcacttggcgatcatggcaacaggccagtgtgatgagctacctgcgacccgaactatacataaaangcggacatactacggaccttagtgctgctgtgctgcagacgcattgatgcgcgtccttagtctagccgaccacgtctggcgacccttgccaactacgcaaatgtgtacagcaattgagcttctccatttgattggcatattgcacccccgaattaatatttctcagctatattctgcacatagtgctccgctgcgtagcatatcgaatttcatcgcaatcgggtcggcggaacaagcatcaagtttgggtggccggtggagcaagncctagagaggatttaccgaggatccctctccgttctggcgaaaaaacattttccaataggccgcggcccccttcttcttgggaaaacacccttcctatcggggcgcccccctatacccccatttcagcaaatactatggcgggagtatctagcgtgcatata

SEQ ID NO: 13989 - DNA, 477 bp, Glycine max
  Coding DNA Sequence Number=SeqID_4210
atgagctgccgccagctgtttcaatgaaaaacggtaggaaagtcgaatgcggatcacaaactggaatcattctattgtcttcatggggacgcttcaaggattgcactgatcaattcactgatctttcttcaaactctattgatgcaaagttgaagcttactgaagataggattattactggatcaaagaatacgattatcaacctggatgcgatattacctaactgacttatccagccaatagctgaacactcatattatcctgctgaaggacttgcatttgctcatgatatgaagttcctcggaagcattgcttatgatcaaatgctaaagctatgggactaggataatatactgctagggtcaatgaacaaaaacaaattcaagtggagtgacctgatactgacgattatgagataggatcttgatcggaacaagataaataatgggcctgctgttaggagttcgaacaacttct

SEQ ID NO: 13990 - DNA, 535 bp, Glycine max
  Coding DNA Sequence Number=SeqID_4211
agaagtcactgatgtcgcctcctcctcctccaccgcttcctccatctccaggatatggatcaagaaagatcgatggagacagcataaccaatatacagatcaagaagttctggaggcagaagcagatcattgaagaggagcatctctttgctgctattaaggctgcagctcgtgtcagagcccgcaatctctctgatgaggactacaaacgctttgaagaaagcttagacatccaggaccctgaaatcgaagctcatgaggggattaaagactggtggatgaagagcaagttcgcatacttgaaccagcctgctcttggatcttctgattcactgaagagaaaaaggttttcgtctgatgtaccaaactatttctccttcaagccttgcattcctctctatgcaacgtcgctcaatgtcttttagatatgagcaaaatctctttcaagatcaattgtcttgtgtatatatgtctgtctacatatatgtgtgtttgtgtctatgtacattcatgtgttactgttcccatgttaatg

SEQ ID NO: 13991 - DNA, 584 bp, Glycine max
  misc_feature (191)..(191): n is a, c, g, or t
  misc_feature (232)..(232): n is a, c, g, or t
  misc_feature (254)..(254): n is a, c, g, or t
  misc_feature (336)..(336): n is a, c, g, or t
  misc_feature (342)..(342): n is a, c, g, or t
  misc_feature (435)..(435): n is a, c, g, or t
  misc_feature (465)..(465): n is a, c, g, or t
  misc_feature (509)..(509): n is a, c, g, or t
  misc_feature (530)..(530): n is a, c, g, or t
  Coding DNA Sequence Number=SeqID_4212
gagaagggcgccacaacacggcaccctcaccaccaaaacgcaccagaacccaaggcccaccgccctcgacaacaatcgccttgaagacaaggccaggcacgcccaccacacggtccacaacagcgaacaccagcacgcgaaactcgaagtacggagaacgccacgcacccacacacacaccacgcggacgnggatgagaagagatagccagccactattccaccactacgancacgcacacgcagacaccaacncacacggcaccaaaagaagaagtaggacacacaacccacacacacggcgcgaagagcgagctacggcgcgctccgcgcacgnagctgncgacgacgacgcgacccgcgccgcgcctgtatatccacagttgtacgacaaccgacggccacagcacgagcacaacgacatagaggtcagcanacacgcgaacgccgcccatcacagagcggnacacagatctcagccacgcgactcgcccgatggcacagccgagngacgcgcgagcacccacatgncgacagcacacgctacacgacgcgcgcacttgcacgcgagccactatgacgcac

SEQ ID NO: 13992 - DNA, 462 bp, Glycine max
  Coding DNA Sequence Number=SeqID_4213
gaaagaagcggaacacgcacagaaggggaaggggaagagaggggcacaccacaccacaccaccaaagccagaccgccagaccgagcccgcgcctgcctccgacgaggcgagccaagccaagcccagatcgaatcccccccctcccgaatccatggacggatcccactcccacgcggccggaggcggcgaggggacgcagaggacgctgaacccctatgtgaccggtaactcggtgattgcaatgaaatacaaggatggtgtgatcatggcatgtgacactggagcctcctatgggtcaactctgcgatacaagagcgtggagcgtatcaaggaggttggtaagcatagtcttattggaggggagtgggggagttcagtgatttccaggagattctgcgctatctggatgaactgactctgaatgatcatatgtgggatgatggcaactcattgggccccaag

SEQ ID NO: 13993 - DNA, 179 bp, Glycine max
  Coding DNA Sequence Number=SeqID_4214
tgctgcagccgtattcgtcttttgagataacaaggacttactgtttattttccggtctttaaagtcattttaaaagagacaccatgtcaggtgaagaggctgctcccgttgttgttcctcccgttgctgagccagcggccatcatccctgaggacatggacttgttgaccgcattggag

SEQ ID NO: 13994 - DNA, 228 bp, Glycine max
  Coding DNA Sequence Number=SeqID_4215
cagagattttgttgcttatttatagctttggaactgccccttaatattctcataaacaacgcatgaatgtactctcaaagcatggagttctccgaagagaaaattgaaatgacatttgctaccaattacctctaacatactttgctatcgaaaatgctactagctactataatagatacagcccagtagacaggcattcaaatagtggagtatcgacggttcttctgt

SEQ ID NO: 13995 - DNA, 509 bp, Glycine max
  misc_feature (36)..(36): n is a, c, g, or t
  misc_feature (387)..(387): n is a, c, g, or t
  Coding DNA Sequence Number=SeqID_4216
accagcgaccgcgagtgttgttatagatatataatnctaccaccgccatcactaacgcaagcagcgacgctgcttcggcgtgtggacatgtcacacgtatccacacaagcgcagacgacgccgctcttcagtatgacagactccgattccattaagcgtcggcgctacagttagacgcgcatcaggtcatgcatcgatgacaagcgcgactagccaaccgatgcgtcgcgccgtgatggtcatcgcagcgcgcgaccgtcctcataccgtgagtatgccgaatgtgtgcgtcgtgagtggggttgttgtttttatgtaatatatatataaataacgctatgagctatactgcagcagtagacgaccaagtgcatatccgcttcttcncatcataatcgcgagcctattactatggagttatatgtaaatactacactaataaatatctttctccgtgccagcgctgcaccgaatcgagcaggtggagcacagtcaatctttcacttgca

SEQ ID NO: 13996 - DNA, 462 bp, Glycine max
  misc_feature (41)..(41): n is a, c, g, or t
  misc_feature (232)..(232): n is a, c, g, or t
  misc_feature (282)..(282): n is a, c, g, or t
  Coding DNA Sequence Number=SeqID_4217
aggtatattgtcaatctcgaactgacacgatctttgaggtngcggcgtatctgtagacatccggttgtatcaggcgcgcgccgcaaggtgcgtcggaacaacaccgggcggtgcggggccccagcctgccgctgccccgatcgaggcacgacgctcgcccacacgcggcgatctttgttcgagcggtgggcagtagagggcggcggctagtacacagaggacaaggggaaanaagatagaatatcaaaggcacacacacacaaaaaagacattgcaatctanatatgggtatttaccaacaacagaatatgatatggataagatacaaatacaagttggatagtcgattacagaacataagagatggataggaaggagtaaatagatccatacttcacccagtctcaccctccaccacctcggcaggcgagcgccgcttcagattctcaacgcacgacacca

SEQ ID NO: 13997 - DNA, 454 bp, Glycine max
  Coding DNA Sequence Number=SeqID_4218
caatatgctggtatctaatggcggattggggaagaaagttgtggggactgacagcctttgtagcatggatggagattatgcacctatggttgagctagcagaccttcgcaagaggcatggctttttgttagtcattgatgatgcccatggaacatttgtttgtggcaaaaatggtggtggtgttgctgaggaattcaactgtgagaaggatgtagacatatgcattgggtcactaactaaaagctgctggctgtcatggaagatttatagcatgcacggtaagtatttgagtgcacttgctcctggaaatagtttctgcgcaacattggtacaaaacattaatgtcggaatgaattacccaagaatttcgctattctgatgaatctttatgcccaaaagggggaactattaattacagtcaagaggtcgggcattcatatttttgcacggctgc

SEQ ID NO: 13998 - DNA, 547 bp, Glycine max
  misc_feature (167)..(167): n is a, c, g, or t
  misc_feature (318)..(318): n is a, c, g, or t
  Coding DNA Sequence Number=SeqID_4219
tggtgcgttcgcgagcatgttctcatacacacaccacactcccacacactcatctgtcccctgtcctcttccgtgtcacagttgtactatatgtagaggtgtgcgtgtggttgttgtggtgtgttgcgtatctattcggggggacgacagtgtatgatggtgtgtcnacgtgtggttgcgtttctcctttgtccccttctcgttatgcgtggccggccacttccccgtcgcgccttgtcggtcgccctgcgttctcacacctcatcttcgcccagtctctctccgctgcaactttgcgcgatccactgcatgaacatntatacagcaacacggcgagtcagcacaaaagatcgtcgaacgacgtatccagacaccagacacataattattatacatcaatacacgaacataagagcaggagaaaaagatcacacactcgctactaccactatctaactcgcctcctcgggcgtccgcccgcgcctcagcaccgccatcctctgtagcgtgtgttggtgtgttaagcgttatagagtgaatcgttttc

SEQ ID NO: 13999 - DNA, 399 bp, Glycine max
  misc_feature (321)..(321): n is a, c, g, or t
  Coding DNA Sequence Number=SeqID_4220
ctgctggcagaacgacaacatctttcagaccttttggtcaatattcttgcgataggaaaaatttactggagagaaaatggcccctaagcaacgtatgaggctagccaacgagaaggcatcgaagaatgtcaccctccgcggcaatgtgccaaaatcaacgaaaccccaggacgacaagtaccctgtaggtccatggctccttgctctcttcatttttgtcgctgtggatcagcaatcttccaaattattcaagagtatcagagcagcggcagtagtctaataacagatctatcttcatgccacaacaatctaatgaattgnattattgactgatgcttatttatagaccactgagtgggttgaattgtacatacaaacgttacatattgggcacagcag

SEQ ID NO: 14000 - DNA, 441 bp, Glycine max
  misc_feature (249)..(249): n is a, c, g, or t
  misc_feature (350)..(350): n is a, c, g, or t
  Coding DNA Sequence Number=SeqID_4221
ttttcccgatcgtgtgttttgttgtgttctcgtgtcacgtcgtctcggtcctcgctctgccgcggtaatatatacgtagtccgctactactataacgtcctatgtggttcgctgagccttgcacatctatattcacgtgtttagttgaagtgacgctgcctcacttctctgcgctgctgactcgctacttttatgttgtcgcacgcctgtgcgcgcctgacgctgtaatcgttttgtgtacgcgtgcgngcgatgcactctccttcttatttgcctcgccgcgatgtatcagaccccgctttcgtcgcatgcgtgccgcggttgtggtcgtctcattctttctttttgcnttgtcttctcgccttcctgcagccgcagccttgctttcgtgcttctctttccacctataccctaccattattcgctcgttacatgcgtcgc

SEQ ID NO: 14001 - DNA, 588 bp, Glycine max
  Coding DNA Sequence Number=SeqID_4222
tccccggttatgtcagtctctgctatctttgggtacatcttcttgcttggttggtagagtgatgatcagtagcagaatagcagtcaatggatcaaatctgctagcttagaggaatgagtcttgacgactggaccaatcaccaatgtaagcagagaatggcaatggcggggtggttcagatgcccatcgacagcatcgcctgggactcccagtattctttggattgcttcaccatctccgtccgctcctcgcgcaggctgcatctccagtaatctttgcaccttgttttgatgagcaagtcgagctcgttcatatgcacggcatgaagcaaacataccaacctctcggcatacaggaaacttgccctctggaggcgcgcctccctacccccctggaaaatgtacacggacgcaccaccccatgcccagccttttgcaaaaaaggtgacccccacttagccgcatatggattgaaccaggcgccccacccaaattggaaaagttagactggaggcccctactttgcatagttctaaaacggcgccaatggcctactggtgcggggggtccttgcctcaggtcacaaaaaa

SEQ ID NO: 14002 - DNA, 584 bp, Glycine max
  Coding DNA Sequence Number=SeqID_4223
gaaaggaccccacagaatagaactcttctgaatctgccattttccttagaagaaataatgcctgtattacgatatgtccgtggtcagcatacttatacaaatgaaaatatccattacttctatgattacaatttggggttggacatgaagagtgaactgttgagtgaatacctaaagaaatgctcaaatcttcaaaacctctattttcgaataattaaggagaaatttaattttcacgaagatgataattacacctttttaaaacttttattaatacatttgttcttttcaaaagcccctttctttgaaaacattactcctgaacctaaaaaataaacagattacacgaactgctcactcaccaataaatattaaggtatctctctatggagaaagcaaatcagaaaagaagtgagacctcagaattgtcatccaaaagcctattaaaaagacaagaacaaagtaagtttctacttgatagcaaggaagttgttcaagtacttgagtatatttttgaagaggatatgtttgagcgagacagatttcacgaaaattggtggtcgcttgtgcggaaaccaaaaaat

SEQ ID NO: 14003 - DNA, 515 bp, Glycine max
  misc_feature (484)..(484): n is a, c, g, or t
  misc_feature (490)..(490): n is a, c, g, or t
  Coding DNA Sequence Number=SeqID_4224
taacaaactcatcggcacaggactgtgcgttctcgttagtgtgctatttatctgtgctcactatctaaatgctaacttgtcacctctcccgcgtcgtcgatcagcttctatagaatcacgtgttgcctcagtacttctgtctcagatatgcttgtatctctccgtcatctttattctctctcatcactgactataatctacttatacgatactatatctctcagcttcgtggtggtatgtacgatcacagatcgactgcgttacctctaacattcaactcttgatctgtatataatatcataaatatacacatcaatagatatgataataatgatagatcacgtctgtgatacgctgtgtaagtagtgctaggtgcctcaatatactctcgtcatcactactgtctcatcgactatgcgattataagaaaacactaaacgttaataatatatatactatcattatagtcgtatatgtaatacanccacgntgtatctgtaacctcttctctgtga

SEQ ID NO: 14004 - DNA, 480 bp, Glycine max
  misc_feature (280)..(280): n is a, c, g, or t
  misc_feature (353)..(353): n is a, c, g, or t
  misc_feature (355)..(355): n is a, c, g, or t
  misc_feature (365)..(365): n is a, c, g, or t
  Coding DNA Sequence Number=SeqID_4225
ttatctattcgacatttgcagcgcgactcatatcattcaatcgtgcgccgtatatgtatatccaccgcttgtatgccaccgcgcggctatgtggtgtgtattacgcgcgccgcggcgcgcggagcgcgcgaagttacgcggctatttgttcccgcaatataatggtgggtcaccgcggaagtgaggtgataataagtcggcggccatcaaatatcggcggtgcggtcggggtagagagtatactatataatcgttgtgcgagcgctcaccgcggtttgtnagtactgtaagtgttgactcggtctttctacacaggcgtcgaggtagtgctaggataatgcggagtagtcgtntnatacgggctncatcgcggtggcccctctttcgtattaatcatataacgcgcgactggcggcgttccacaatgagacagtgctgtgccgtcgcgcagaggggagggtaatcatatgcgccggccga

SEQ ID NO: 14005 - DNA, 542 bp, Glycine max
  misc_feature (397)..(397): n is a, c, g, or t
  Coding DNA Sequence Number=SeqID_4226
accacacaggcatagcagctacgcggggggaggtgtaacacgtgtgcggagccgtgggcgacgcgctgcacttaccctgacgccccattactgagctctatccgcacgtgagtacgcagacgctaatggcttaggagattgttaggtgtgtagtagtgaagtgtgcggacgcgggtgcgtcggttgactagtcgtgcgtgagggtagcggtagggctggattgacagtgtcatttggttattgttgggagtgtgagtgttttgtaccgtcctggcgggtcgcgggggtggtggttgtgtgtgttagtttcgttctttatatagatataaaatagcaattcctacaatctgatcacattctcctatgtatatattggtttgcatgagctatattattnttgtctgtgatggtgtgttttgtgtgtggtcttccttattttgtgtgtggtgggtagtgtttgcctcaaatcaccagcatcacggcggtcgtccttcttgttgtctatgtcggtggctgcacctccgcggccgtcgagataaaga

SEQ ID NO: 14006 - DNA, 267 bp, Glycine max
  misc_feature (69)..(69): n is a, c, g, or t
  misc_feature (76)..(76): n is a, c, g, or t
  misc_feature (125)..(125): n is a, c, g, or t
  misc_feature (141)..(141): n is a, c, g, or t
  misc_feature (145)..(145): n is a, c, g, or t
  Coding DNA Sequence Number=SeqID_4227
agggttctccgtgtggcagcaacgcgtcgtgtccggaagaaacgtccgtgttccactttatttgccgancacgcancgggcggaagggaggtcccgcgcatcattcaccgcggacgttcccgtanctcttccttttcactnctancacattcgatgggggaactccgtccggcgggaagatcttcgttaactctcatccggggggcgggctgggatcaaccgctaaactacgcgcgcatgtagaccctcgcggatctttcttttcgg

SEQ ID NO: 14007 - DNA, 537 bp, Glycine max
  misc_feature (169)..(169): n is a, c, g, or t
  misc_feature (266)..(266): n is a, c, g, or t
  misc_feature (268)..(268): n is a, c, g, or t
  misc_feature (327)..(327): n is a, c, g, or t
  misc_feature (342)..(342): n is a, c, g, or t
  misc_feature (366)..(366): n is a, c, g, or t
  misc_feature (386)..(386): n is a, c, g, or t
  misc_feature (422)..(422): n is a, c, g, or t
  misc_feature (427)..(427): n is a, c, g, or t
  misc_feature (430)..(430): n is a, c, g, or t
  misc_feature (440)..(440): n is a, c, g, or t
  misc_feature (472)..(474): n is a, c, g, or t
  misc_feature (478)..(478): n is a, c, g, or t
  misc_feature (490)..(490): n is a, c, g, or t
  misc_feature (512)..(512): n is a, c, g, or t
  Coding DNA Sequence Number=SeqID_4228
gcaagcgccattctgtaacatgactcaccgcgctccatcgagcgcgcaggagaaaccgcggatacaaggctctatctgcttactgcactgattgcaggatagccgactggttcgtgagaaacgtcatacgtagttcgtgtcgcttgtctcgtcctctatctctagttanttttactattcccgacttctttatgtgaagatagtagacgttcccgatagatgtgagatcggctgatatacatgtacgaggttgcggtgtgctcagngnctctctccggcgagatgcatacccagtggagcatcaccctagcaccctcccggtcagtncagcgtgcgatacgngtgtactatctctattatacaacnctgctctctatgtgcgtctncattcgagattgtgagagttgggggggtgggttgtnccctnacngtcgttgatngcttgcgtgtcctccctcatggagtgatgtgnnncctnctcctctcatcncttgcggtatttgttgtgtgtntacacgtctcataacgcgcgcagac

SEQ ID NO: 14008 - DNA, 228 bp, Glycine max
  Coding DNA Sequence Number=SeqID_4229
gggaagctttacattcccttccctgtggagttcccagattccctaaaccctgaccaggttaaggccttggaaattgttttgcccccaaagccttttttccaatttacaaacatggagctggatgaatgttaggaaacaaccctccattatgtccccatgggggggggggttaggaggaagcccccccaagctccggaggcatattattaggattattccatgcctggt

SEQ ID NO: 14009 - DNA, 561 bp, Glycine max
  Coding DNA Sequence Number=SeqID_4230
atcactgttacacttcgtgcgaataatgcatgtaatgaaaaacttaacttaccaaacaaacacatcgcatcataagatgaaccgatctatctatatatctatctagcgccattgatcatcacgtactgcatctgcacaaaatttactagcttctcctcatgccggtccaccacctatattcgctggcccactccttcttgatctgggccggggaggggttgcggtcctggtcgaggccctcgtccatgcggtggagatactcgtgcttgaacatgacggggttgccggcgaagcactcgcgcagtgccgccgtggccttgacgcacgcgtccttgtcgacgggggtggccttgcgttgctgcttcttgtaaaactgggggtgccgctgcttcatgtaatcggggttgcacacgtccatggcgatcacgaactcttggaggcacccgccgttggcgacgtgatgccagaccatcttggtgtcgacgaggtgcatggtttcgtccagggcgtccttcatggacgcacgtccgggcaaaaagttccccatggaccggccttgat

SEQ ID NO: 14010 - DNA, 358 bp, Glycine max
  misc_feature (127)..(127): n is a, c, g, or t
  misc_feature (186)..(186): n is a, c, g, or t
  misc_feature (317)..(317): n is a, c, g, or t
  misc_feature (321)..(321): n is a, c, g, or t
  Coding DNA Sequence Number=SeqID_4231
atgccagaagggacttcagggtctggttcattcaatctggaaaatacccctagactcagagcacttggtaaaggttccaaaaccatgtgaagaagcttagttccaatacccagttacagtgacttcnacccatccaagtgttccaaattgatgatttggaattcaagtcaagcattatcaagaacnatgattttgaatcgagaccaagtggtactaagtatgatgattttgaactcaagtcaagcgttccaagaacaatgattttgaaccgagaccaagtgctcccaatatgatgaatttgactcaagtcaagccgntccnagaatgatgaatttgacccagacccaatattaccagg

SEQ ID NO: 14011 - DNA, 579 bp, Glycine max
  misc_feature (112)..(112): n is a, c, g, or t
  misc_feature (171)..(171): n is a, c, g, or t
  misc_feature (286)..(286): n is a, c, g, or t
  misc_feature (382)..(382): n is a, c, g, or t
  misc_feature (445)..(445): n is a, c, g, or t
  Coding DNA Sequence Number=SeqID_4232
gccattatccttgcgaaccaacaatggtataattccggtgacgctgtccgttgctgtatcctggtacgtctacacacactcattccataatcaacgcactgttaccatgcanccctcgtgcacacggtacatgactccatcgcgtcttgacttgttcaccgcactcgtgcnaggacatgttagcactatcacttcgcactataccataccatgtgtatatagtcttgataccgctaggataggacacgaagctagatattatacgactgtggactctgatcacgtntgtcccgaaccttgcgagcgcagtgacaccgtgctcgactgactgctcaccacatcatctgatatgcagcgttgctcacagctatatggctaggtntaactgtgagcactgaccgctacactacattgtctcatctcacgacaccgagatcctgtaatntcccacggctcctcgagcatcgcgatgatctgaccggcgaccttgcacgtgctgacgctattacgcccgcgttccgtctctcgacttcgaaactctatcgcacccctcttggcatagctcgctactctggcgga

SEQ ID NO: 14012 - DNA, 592 bp, Glycine max
  Coding DNA Sequence Number=SeqID_4233
aacttttggcctaatccaatcatctttgtgatggggttatctacttactcaaatcattggtggcatatgggcagacaaacttggtgggaagctagtactaggttttggagttgtctggtggtcaattgcaacaggtttaacacctattgctgcaaaacttgggttgccatgtcttcttattatgcgtgccttcatgggaattggggagggtgttgcgatgcctgcaatgaataatatactttccaaatggattccagtgtcagagagaagcagatcactagcgctagtgtatagtgacatgtaccttggttctgtgactggcttggcattctcgcctatcctaatccagaaatttgggtggccatcggtgttctattcatatggatcccttggaagtatctggtttgtagtatggttgggttaagcatacagctcaccaaaccaagacccggatcttggtgcttaagaggagatatctatacttcgaagcaatgtttcaaaatgacctgcgtgagatatttctgtggaatggaatccatcaactgcatcctgatggggcttaataatgtctaacatagtgctatagtgtggg

SEQ ID NO: 14013 - DNA, 428 bp, Glycine max
  Coding DNA Sequence Number=SeqID_4234
atctgggcttcctcctcaagaaggttccgaaatccccttatgctccccgaacaaaaacccccctggacccagaaaaccttattttttttgcctcccaaaattggagggggcaaggaataaatggccttttcccttttgggaacccaaattttccaaaaatttgaaacccaagcaaccgccccaaagggctttttaaataaaaacccccccccaaatttttggggggggtggcccccttgcataacccccaccttgttagttggagagggcgccctaaaaaaccctttaaaaaaatttctttcataaaaagagaggggttattggggcgttctaaaaaaaaaaacacaaaaaatttttcgcccacccgtgggaaaaaaaaacacaacaacaaaaagtggggggagaaattatttctccccaagaggtgg

SEQ ID NO: 14014 - DNA, 598 bp, Glycine max
  Coding DNA Sequence Number=SeqID_4235
ggtagtttggccttcgtcaattatacatgatatcgatcattaaatcgccggagatgcaatcgatggatgtactaagtctataggaagtaatcgggtatccttagattaacggttgggtacgtgatcagaacgaacttatataagagatactctgcgctgagtctgactcccgtttcttacgcagatctctctgttatgtaatagggtggcgcgtggcggcacgtgcgggacgaggtgaaagacacgtgtctgagtggaggtgagaatgtttgtaagagaagaagagctatgcagggatagaagagtggtatggatgtcgaactgaagaggagagatcaggcgtcgtgtgtcgggtagaattgtcagagcctatgacacggttcagaatatccgacactatgtcatcgagtatatacttagtgtaggtaatgattaaaaatagcgacgtggtcgtgtgaaggaacaggacaatgagcgtgtgtttaacagaatagacataccattagatatgagcgtcgtgagtctgttggactgggccgtagcaagagaagaagtatatatcgtgaaggtgggtgtgagggtgcgacgcatattcacg

SEQ ID NO: 14015 - DNA, 219 bp, Glycine max
  misc_feature (129)..(129): n is a, c, g, or t
  misc_feature (140)..(140): n is a, c, g, or t
  misc_feature (145)..(145): n is a, c, g, or t
  misc_feature (173)..(173): n is a, c, g, or t
  misc_feature (185)..(187): n is a, c, g, or t
  misc_feature (189)..(189): n is a, c, g, or t
  misc_feature (191)..(191): n is a, c, g, or t
  Coding DNA Sequence Number=SeqID_4236
gactatgaatctctacttccatctggatctcttgaagatcatgagggatagagagaggagatttacgtaccgatctgatgagatcgaggttgagttcatcgggacggagcaacatatcggagctatgantccggtaaaanataanttcccgatcaccgtgcggccttcaacgncacgaacgccannntntnttctgggtccggaatcgaagttgatccc

SEQ ID NO: 14016 - DNA, 126 bp, Glycine max
  Coding DNA Sequence Number=SeqID_4237
tgcaatagccgccatgggtactagggagggtaaaattgctgaaatcgacccgacattgagctgttaacatagtcgggctgatacctgttgggtgatatagttataccgtccctctggagtatggag

SEQ ID NO: 14017 - DNA, 564 bp, Glycine max
  misc_feature (57)..(57): n is a, c, g, or t
  misc_feature (329)..(329): n is a, c, g, or t
  misc_feature (349)..(349): n is a, c, g, or t
  Coding DNA Sequence Number=SeqID_4238
attttaggtgtggtgggcccacgcaccgacttgtctaccgcctccgacacattattnactctgaataggcccctgctcatatcagtataagtacacgatccgtgtcgcgagcttgttctcttgcgtgcgcgacatcttcctctctcctcaccgtctgtcgcttgctgccgtgcagggtgaggtgaggtgcttacggactgttgtgcccgtctccttgtcttatgttatgtgcatgtaccgtggcacgactcctaagtcactgtgctagagtattacctctcgtctttcatactatgtaacagtgtagatatgactgctcctgatcacantcacctgtctgggctctatntctgagcttcctcgtaatcatctagttttcttgtctgtatgactggacttatgacggtacagagtgcacgcgcacactataccagaaccaatgacagtaccatcaaacaagacacagctgacgagtgctggctggcgatctatcagagctcgagggcgtggtcagtgcgactacggacccctatcgagtagcaatgtgtatctgcgcttgattct

SEQ ID NO: 14018 - DNA, 565 bp, Glycine max
  misc_feature (114)..(114): n is a, c, g, or t
  misc_feature (199)..(199): n is a, c, g, or t
  misc_feature (406)..(406): n is a, c, g, or t
  misc_feature (492)..(492): n is a, c, g, or t
  misc_feature (540)..(540): n is a, c, g, or t
  Coding DNA Sequence Number=SeqID_4239
acacgtcgcaatagcctgcagattgtagatgtgtggagtgtatctagagtatctccgctcacgtcccgccctccacgcgctctctctcaacatcaatctatacatcgtctcttntgtgtaggcacgacacaacctcagccactaccaccacggacacacagacgagaacgagactactcactccgacacgatggcgtanaggcacaaccgctcccatcatctaacacagaaggcttagcgcgacgctacccacgccgcgcctgccgctcatgacacgtcgctgcagcactctagtgcccactccagccatcgctcacacaacacgccgcagcacacacgcagactcgcgtacgatggatgagtgagcgcggtctccgcgactcgtgcggaggtgagggagagcttncacggccaatcgatatctactctgacgtcacatatcagatgacattctatcgacgcgagacgcgtcagaccgagctccgatacagntggatgttataacaaccgatagagatcggcactagctgtatgatctantcattatacttatcgtctacggtgt

SEQ ID NO: 14019 - DNA, 202 bp, Glycine max
  Coding DNA Sequence Number=SeqID_4240
gcaaggacatctcagcctctgctatgtagcgggatcaaatgctcccctctctcattttgttctcttgtctccaaaccttccttatgagtccctgcaatcccattagcgagtttcattgaccatagtgaatacaatagcatttgccaatgcacagatcaaagagaggacgaggtttaagtaactctaacaaaaagcctacgag

SEQ ID NO: 14020 - DNA, 272 bp, Glycine max
  Coding DNA Sequence Number=SeqID_4241
ggctgaagcacaaatacgaaaccaacatggaaaccctgacccacacacagataaatacggaaatacggatatataaactgacgagcgcggtaatcccgaccaactcactgatgtcgctaccaccgataccgacacagcaagttatgggtgtggatcctatggtaccggtgattacagtggtggtgcaagtgcaaacaccgatgcagatatattggcaacccaaccaaagagtggcagggaggctagagagcttgatcgatcctccagatcaa

SEQ ID NO: 14021 - DNA, 579 bp, Glycine max
  misc_feature (97)..(97): n is a, c, g, or t
  misc_feature (163)..(163): n is a, c, g, or t
  misc_feature (376)..(376): n is a, c, g, or t
  misc_feature (399)..(399): n is a, c, g, or t
  misc_feature (419)..(419): n is a, c, g, or t
  misc_feature (497)..(497): n is a, c, g, or t
  misc_feature (544)..(544): n is a, c, g, or t
  Coding DNA Sequence Number=SeqID_4242
ccgtactctcacatgctattactttatattcgacttactacatacgacctcattatatattatacgatctgattgcctcatcgtgctgctttcacanacgacactccgcatactcatgtatacgctacctcatctgatcctccgtagcgcgcactttatcatncctatgacacgataacactaccaacagtcgacatcgatctgtaagtactactactcgtaacaactactctatgacacacgtctacttctactcttacatcttcttgtgacgacatatactctaactgtgcgcacacatctacgcacctcactgacacgtcacatcactgtctctactccgaatcacacgctctcaccgtacacacagtctaangcgcgctgtcgtacgctaatcgntgcttgatacttcattctcntgacctctcacactctatagagagtgacagcttatgacacctccgcacacctattactcttctgtctctccacagcgntcgcggtatgctctgtatctgtctacgtatctatctctactatcgtnctatgacatatatactctcgcttatctgtctatga

SEQ ID NO: 14022 - DNA, 380 bp, Glycine max
  misc_feature (26)..(26): n is a, c, g, or t
  misc_feature (49)..(49): n is a, c, g, or t
  misc_feature (77)..(77): n is a, c, g, or t
  misc_feature (79)..(79): n is a, c, g, or t
  misc_feature (96)..(96): n is a, c, g, or t
  misc_feature (107)..(107): n is a, c, g, or t
  misc_feature (159)..(159): n is a, c, g, or t
  misc_feature (163)..(163): n is a, c, g, or t
  misc_feature (168)..(168): n is a, c, g, or t
  misc_feature (184)..(184): n is a, c, g, or t
  misc_feature (190)..(190): n is a, c, g, or t
  misc_feature (221)..(221): n is a, c, g, or t
  misc_feature (227)..(227): n is a, c, g, or t
  misc_feature (236)..(236): n is a, c, g, or t
  misc_feature (239)..(239): n is a, c, g, or t
  misc_feature (244)..(244): n is a, c, g, or t
  misc_feature (265)..(265): n is a, c, g, or t
  misc_feature (267)..(268): n is a, c, g, or t
  misc_feature (277)..(277): n is a, c, g, or t
  misc_feature (300)..(300): n is a, c, g, or t
  misc_feature (312)..(312): n is a, c, g, or t
  misc_feature (322)..(322): n is a, c, g, or t
  misc_feature (334)..(334): n is a, c, g, or t
  misc_feature (338)..(338): n is a, c, g, or t
  misc_feature (352)..(352): n is a, c, g, or t
  misc_feature (355)..(355): n is a, c, g, or t
  Coding DNA Sequence Number=SeqID_4243
ctcgatgcgtcatcgatcgtctcgtncctctctgaatctatgccgcacntcagtactgtgacttgtcgcatcgctcncnacagtcgctgctgatantagtttctacntactagtagggtactgaccatgcgcatgcagtaatacgtatcatagtagtcntggncttgnctgcgtgcgtacttgntgtagntgatcagtgctagctcttgctgtccgcatcntgctgnctagacttntantgcancgtctgatccgatgtcatcgntnnatgcatgtnactctaatgtgtattaactactncagtacgaccgnactagctacntgaattatcatnagtngtagtccgtctagnacnatagtactgcagacatgtcatggac

SEQ ID NO: 14023 - DNA, 560 bp, Glycine max
  misc_feature (501)..(501): n is a, c, g, or t
  misc_feature (503)..(503): n is a, c, g, or t
  misc_feature (521)..(522): n is a, c, g, or t
  Coding DNA Sequence Number=SeqID_4244
aaaagagcacatccacactaccacgcgcgcctgcggtccgttcatgttttcatttcactatataattgtggcatatattaattagtagtgtgtcagtatatcaaagaggtattgttattgtgtagatatatggagtagcgtgcgtgtttatgcttgattctaacagcttgtattctctgtgcgttcctcgtggattgtatctttatccccgtttattgggtattatacaagcatatattgtatataatggtatacatatgtttatgatatttgtgtggttgttgtcatttttatatgtatcatcatctagtacttctatgtggtggccatcgggactctctgtctagtggggtaagataaaattaaacataactctcttcttctctgtggctacgccgtcctccacatactctctcgcgcgccgcgcgttacgtattataattaaaaataatcttattaactattacttcgtgagtgtatgggtcggatgtgtcggtggtntnggagagatggagaggaannatataaaagggtttacataggctcagtgctggttttaa

SEQ ID NO: 14024 - DNA, 527 bp, Glycine max
  Coding DNA Sequence Number=SeqID_4245
gacgacggataacggcgcagacatcccatccgagaataaaggaaataaataattcgtagtgttgttatatgctcgttgtcagctcgttgtgcgcgtgtctgtaatttaaattgaatgcgccttccatacctcgcggaaaggatctaccatcccagcacgccgggcacactacctccgacgaccgcccagcatgagtggtttacggttttgttataatttttactatccttctaggtctgtcatatatggtcgttctctaggcatactcccggtcgccctgcatttcgtctcttacgatgtcagtcgatcacaaagtcttgtaaagcaggggatctgtcggtggcgggccgagttgatttatttcgagttctaccttacatccgtgccatctaatcccacccgcctctttgcttgcgtacgcctttttttcaccatctcccaaaccaaatatcaagacggggagccggggcacttcctaatattcactgcgggggggggggccgcggtaccccattatcgaaattact

SEQ ID NO: 14025 - DNA, 418 bp, Glycine max
  Coding DNA Sequence Number=SeqID_4246
ccccgtctttgtgtggacaagacgaaaactagaagagagaagagagagaagagagagaagagagagagagagaaaatggaattaggagagtattcaggatttatttcaaaaatagaagaatatgaaaataaaataaaagaagattatcctctctctcgaaatattcccacacaagaacatgtgaaatcagctgctaaattaatagaacatgaaataacaaaattctctctcgtgatgcaatatgaaaaaggacaagaaattcatttttcttctttattaaattctttggataaattatttgctatgtttactaatttgtgtggatatgctgggcctactatgaaaaagaagataagagcatcctttggggctatattctcaagtgtgaaaaatgtagcactcgaattccgaagattag

SEQ ID NO: 14026 - DNA, 563 bp, Glycine max
  Coding DNA Sequence Number=SeqID_4247
attgtgttatggttctatctggtgcatacattacatgtaaggatactagacttgcctgtattcgtcatttaaaagacatacataggtcgaaagataattctgaatggaattatgtttataaacctaaacgtgctaaaaaggttattaaattcattgaggcgttacctgatacaaaaggtaatattaacaaactaggattattccaaaagttcattattgctagtgtaagaggttggtttacgaaagatacggatatgttgagatttaaaaaagcttttatatctatggcacgtaaacaaggtaagtccattctagtaagtggcttagtattatatgctttcttatttgataaagagcctaaagaaggtcgacaaatgtttactgcagccaatgacaaatctcaagcaagtatcgtatttaatatggtagcgaaacagttgatgtatttcgtatctaaagtaccagaactcaaaaaagacgttaaaaaggtacgtgaattacttacgcatacaaaagatggctcgtatattcgccctttatctcgtgatactggagcggttgat

SEQ ID NO: 14027 - DNA, 476 bp, Glycine max
  misc_feature (26)..(26): n is a, c, g, or t
  misc_feature (95)..(95): n is a, c, g, or t
  misc_feature (115)..(115): n is a, c, g, or t
  misc_feature (139)..(139): n is a, c, g, or t
  misc_feature (149)..(149): n is a, c, g, or t
  misc_feature (215)..(215): n is a, c, g, or t
  misc_feature (239)..(239): n is a, c, g, or t
  misc_feature (260)..(260): n is a, c, g, or t
  misc_feature (304)..(304): n is a, c, g, or t
  misc_feature (325)..(325): n is a, c, g, or t
  misc_feature (329)..(329): n is a, c, g, or t
  misc_feature (351)..(352): n is a, c, g, or t
  misc_feature (407)..(407): n is a, c, g, or t
  misc_feature (428)..(429): n is a, c, g, or t
  misc_feature (431)..(431): n is a, c, g, or t
  misc_feature (448)..(448): n is a, c, g, or t
  Coding DNA Sequence Number=SeqID_4248
catagtatatatgcgagctgtgtaangtcacacgagtgcgacacatcctagtatgcatgatcgattcgaagcaggatagaattatgtaatacatncatatctcgctcctcgtcancgtcgcctctcctgtatcgctcgnctctatcagnacactattgtaccctatatcgtctacattcgacatacagtgtgctctcgtcgctgatctctgctcnctcgtcgtgttgcgtcttagtcancagcgcactctgttacgtagncgtctgtagagacatacacgactagctcgatctatacgacatcntagcgacagatacattaacantagncgataaatctaagttaaagatnnataaatcctaacaaatacacaagtgaacagttaacactgatacaatcacaacgtnacccaatacgtacactactannancccgagagacatgacgnattgagcacatgatagacacacacagag

SEQ ID NO: 14028 - DNA, 551 bp, Glycine max
  misc_feature (326)..(326): n is a, c, g, or t
  misc_feature (408)..(408): n is a, c, g, or t
  Coding DNA Sequence Number=SeqID_4249
tcgcgactacacagagagagcctcttcagagaacaactgctggtccacctcactatgttactgttatcacaaacaaagaaatatataattactaataccctagaaacacagagctacaaataacttcattacgcacgtcctctaggtgtgcccacacttgtctttcatcactgctctcgcccgtcatatcactcgccactccctacggcagcgacgaggttctatcctctctctcctccgtcacttctctcttcctacacgaactcgcagatctgacgtatgatatatacccataataatgtacaatatcctcagtatggagttanttaagcactataatagaacaatcttctctcttctcgcccacatagactcactgctcctcttcctctctctctcacccatgtntgtgattcgattttatactaaaagacaccacgcgcatgaggtcgcggaagaggggacccgcgaatacactcaactcgacaagaatataccaaatacactctctcccagtgacagtcccattatacactatgagttccgcccgt

SEQ ID NO: 14029 - DNA, 532 bp, Glycine max
  Coding DNA Sequence Number=SeqID_4250
cgcttcgactattgtcgttcccgcgccgcccgaggccgggcgggcccaggacctaggatctgctcttgccaagataatttttcgtacggttccctctacttcgctttcaaaactttcataaaacaaaatggcgggtcgtggaaaaactctcggatctggggttgctaagaaggcgacgtctcggagcagcaaggcgggtctccagttccccgtcggccgtatcgcccggttcttgaaaaacggcaagtacgccgaacgtgtcggcgccggagctccggtctacttggccgccgtactcgaatacctcgccgcagaggttttggaattggctgggaacgcggcgagggacaacaagaagacaagaatcgtgccgcgtcacattcaattggcggtgaggaacgacgaggagctgagcaagttgcttggagacgtgacgattgctaatggaggtgtgatgccgaacattcacaatcttcttcttcccaagaaggctggtggtgcttccaaaccttccggtgacgacgaatagatc

SEQ ID NO: 14030 - DNA, 530 bp, Glycine max
  Coding DNA Sequence Number=SeqID_4251
actctgggcattctgtggtaactcttttcaggtttggggagatggccttgagccatactaaaacaagaatggaagaggcctggacaatcgacgaggtgaagttcaatgtgcaaggactttctgtggagtggtacattccgccagctgagggagagaacagcgttgagtcacagaagcttgcgaacgttgctcaggagtagaaatagcggagaacatcactatcagtacataacactaaagttgtggcggtgcagagattacataaatgcagtatttatagcatgatgtggaatatggaaagctatgggatagcggtaagatacaattgatggcaacggataatatcactgagtggttgctgacgactatgctggacagtatatagcaattgcttagctggaacgaatcaaggaggatgttaccaagaagtatgctggatgaaaagactgcacagcggctgctcataggcttaacagagagtatggacctaagttgaatgaggagatgcagtactgtgttggacaaccaga

SEQ ID NO: 14031 - DNA, 527 bp, Glycine max
  misc_feature (39)..(39): n is a, c, g, or t
  misc_feature (41)..(41): n is a, c, g, or t
  misc_feature (54)..(55): n is a, c, g, or t
  misc_feature (59)..(59): n is a, c, g, or t
  misc_feature (200)..(200): n is a, c, g, or t
  misc_feature (212)..(212): n is a, c, g, or t
  misc_feature (252)..(252): n is a, c, g, or t
  misc_feature (305)..(305): n is a, c, g, or t
  misc_feature (337)..(337): n is a, c, g, or t
  misc_feature (347)..(347): n is a, c, g, or t
  misc_feature (376)..(376): n is a, c, g, or t
  misc_feature (393)..(393): n is a, c, g, or t
  misc_feature (399)..(399): n is a, c, g, or t
  misc_feature (434)..(434): n is a, c, g, or t
  misc_feature (458)..(458): n is a, c, g, or t
  misc_feature (499)..(499): n is a, c, g, or t
  Coding DNA Sequence Number=SeqID_4252
aacagtaggactgcacttataaatgagagacgtaatatnantacaacacactanncacncatatatagatataactacacccagcccaccacacctgctacgcgtctcgcgtgcacgcactatgttagttgatatagtagcacctactccacccctctcttacatcatcactgactcgttcggatgctcatcagtgctgncacggcttcgcncatatcacacgtgtacgcaatacgatccacgatgtcgacnctgcacatactgcccatagccttagcagcacgatatccggtcactagtacgcnctaggcataagcgtagctgcgatgtgcgtganactgatagancgagcggcgagatagacgagaccctgagnatgtatgtcgtagagcntggatngcagcgtagtgcgcgacaccatatcttatgacggngtgtcgaggcactctgatatcatnctctcaggagctcaaagcagacgaacagagctgatactagnagatcgtagtaggacatgcactgcacaa

SEQ ID NO: 14032 - DNA, 489 bp, Glycine max
  Coding DNA Sequence Number=SeqID_4253
aaagttgaagctcctcagcaagggaaggaggaagaagtcttgaacatggatggcaccgagtgggttaacctctttgtcagtgagatgatgaatgcttcagacatgaaagacgcgaaagaccgtgctgggagagcgttagaagctttggagaagtcgatcaacgcacgtgctggtgccgatgcggcgatgcagagcagtctccagcaggagaactcgatgctgaggcagcagttggaagctattgttcaggagaacggtttgcttaaaagagcggtggtgatgcagcagaagcggcagaaagagagtgatgatcaaagccaggagttgcagcatctgaggcagatggttactcagtatcaggagcagctgaggactcttgaggtgaataactatgctctcacgcttcatctgaaacaagcgcagcagaacaatagttctatcccgggaaggttccatcctgacgtgttctaatgcgtttgtcatgtcagt

SEQ ID NO: 14033 - DNA, 331 bp, Glycine max
  Coding DNA Sequence Number=SeqID_4254
agtggctccgcgacaacccgcggttcccggccttcgtcgcgccggggaggccccgggtgctagtggtcaccgggtcgtcaccgcgccgatgcagcgaccccgacggcgagcacttgctgctccgggcgttcaagaacaaggcggactactgccgcgtccacggcttcgacatcttctacagcaccgcggtgctcgacgccgagctgtcggggttctggtccaagctgccgctgctgcggacgctgatgctcgcgcacccggagacggagctcctgtggtgggtggactccgacgtcatcttcaccgacatgctcttcgagccgccgtggga

SEQ ID NO: 14034 - DNA, 554 bp, Glycine max
  Coding DNA Sequence Number=SeqID_4255
ttatgtcatgcgtagtcctttccctagccctgctcgtcgtcagggcagcggcggtggcgaggaacagcccagactcctgctgcaaggagcagtgtagcggccgtcaggactacaaaccatgccacgccgcgtgctggtggggcatgcatctgggagacctgccaaactgccacctgcgctgccgctacgcgaaacactacgacacatgcttcgaacagtgcaaaaaagaacaagaaggaagtgggggaagagttgggctacttgcggcaccggcagagggacaaaaccaaggagaagaagccaaaccaggaggagcagctgggctcctggagatgccaacggagcttgccggatgaggagaagaagagaggaggagggcagaggacttgcgactgagactatgatccctcctccttctgttgccaggactgcatgatctgacgccaaatatactttttttgtttttttcctagctcaccgatcctcttgttctgggtgtgagcctgcaaccctgtgcgtctgccacactcttaagatcgccacgatgtgctgct

SEQ ID NO: 14035 - DNA, 439 bp, Glycine max
  misc_feature (47)..(48): n is a, c, g, or t
  misc_feature (51)..(52): n is a, c, g, or t
  misc_feature (91)..(92): n is a, c, g, or t
  misc_feature (94)..(95): n is a, c, g, or t
  misc_feature (97)..(97): n is a, c, g, or t
  misc_feature (108)..(108): n is a, c, g, or t
  misc_feature (146)..(146): n is a, c, g, or t
  misc_feature (168)..(168): n is a, c, g, or t
  misc_feature (183)..(183): n is a, c, g, or t
  misc_feature (215)..(215): n is a, c, g, or t
  misc_feature (221)..(221): n is a, c, g, or t
  misc_feature (240)..(240): n is a, c, g, or t
  misc_feature (270)..(270): n is a, c, g, or t
  misc_feature (273)..(273): n is a, c, g, or t
  misc_feature (290)..(290): n is a, c, g, or t
  misc_feature (324)..(326): n is a, c, g, or t
  misc_feature (329)..(330): n is a, c, g, or t
  misc_feature (333)..(336): n is a, c, g, or t
  misc_feature (338)..(338): n is a, c, g, or t
  misc_feature (343)..(344): n is a, c, g, or t
  misc_feature (346)..(347): n is a, c, g, or t
  misc_feature (353)..(353): n is a, c, g, or t
  misc_feature (360)..(360): n is a, c, g, or t
  misc_feature (377)..(377): n is a, c, g, or t
  misc_feature (379)..(380): n is a, c, g, or t
  misc_feature (393)..(393): n is a, c, g, or t
  misc_feature (396)..(398): n is a, c, g, or t
  Coding DNA Sequence Number=SeqID_4256
ggagacacagtcgacctacgctcgatcgcgcggcaggtgcgcgaganncgnncgacgcggcagtcgacgtcgtccaacgcacatcaccagnntnncntcacgtatgcntgtagaatcatatatctcacacaatcactcgtataganggaaagatgtagagacgcgcanaccctaactcacgcncccagcgccagcgcactctcgcgcgcgtagcngcacgngcgcgcgaatgtacgcggnacatcagacggagacgtaattggtgtattnttngttttctttgggcggtngagagaggcctgatcgcagcgccgcaatgagctnnnaannacnnnngnggggnngnngaggtnggtgtgnagagaacacagctctcnannagtattgcaaagnacnnncgacgacgcaagtatcgtgtgtgtggcagagtaaatacaat

SEQ ID NO: 14036 - DNA, 515 bp, Glycine max
  misc_feature (39)..(39): n is a, c, g, or t
  misc_feature (41)..(41): n is a, c, g, or t
  misc_feature (164)..(164): n is a, c, g, or t
  misc_feature (251)..(252): n is a, c, g, or t
  misc_feature (269)..(270): n is a, c, g, or t
  misc_feature (358)..(358): n is a, c, g, or t
  misc_feature (360)..(363): n is a, c, g, or t
  misc_feature (366)..(367): n is a, c, g, or t
  misc_feature (370)..(370): n is a, c, g, or t
  misc_feature (424)..(425): n is a, c, g, or t
  misc_feature (448)..(449): n is a, c, g, or t
  misc_feature (453)..(453): n is a, c, g, or t
  misc_feature (466)..(466): n is a, c, g, or t
  misc_feature (471)..(471): n is a, c, g, or t
  misc_feature (473)..(476): n is a, c, g, or t
  misc_feature (481)..(482): n is a, c, g, or t
  misc_feature (488)..(488): n is a, c, g, or t
  Coding DNA Sequence Number=SeqID_4257
gagcggataactcactgtgttgttgcggatatatataantncgagtatttggtgtgtggtggggcgcggtcgtggtatcagtttatcgtcgcgttctgatccgtcgaccctctcattcatgcgtgatccacctatgccgtcttcgcccccgtcgtgtgccctancactatcatgtcgtccggcttcggctccgtgcgacacatcgcggctgggacgaaggtggtgggtggtactcttgtgatgataaacgnnacagacgacgaagattnnatcgtatttaggtagtgcgatgaggatcataccatagtatgtctgggtgatgcgtgtgtattatatgtgtgtgtataccaatggctgngnnnnttnntanacggcgggcgcagacgtgggcgcgcgcctccgtcgcgcgccccctcacgcgccnnccacaccgcagacacaagaacgnngagnggctcgccccggngcgcngnnnnggcannccaccnccgaacaaaacacaagcgcgagaaaag

SEQ ID NO: 14037 - DNA, 559 bp, Glycine max
  misc_feature (166)..(166): n is a, c, g, or t
  misc_feature (506)..(506): n is a, c, g, or t
  Coding DNA Sequence Number=SeqID_4258
ttagccacccaacgaacaataagcccgtcaggacgtaccgatcgccacttagtctgtctgtcttcgctacctcttattcgtcgcttcactcctctctactgtaccagcagcgcattatcattccgagccctcctcttagcttacacatccattccccacatcactncgcgacctatgctgtatgactcagtatatgattctcaccgccaccccaattacttatactatctcctaccaataaacctaccaacaggtactctaatctgtactaacatatcttcacacactcccgatatcgcgacgaatgcatgagatagatcaccgtaatctcgcgaacctcagtcatgctcctcgcatccgctcgatgtcgacaactcacaccctcgacactacgagaatatatacgtttgacacattcacttgtctctagtgttttgtgtgcatgaatatatagtgaatccgtcgataattggccacccgacgtgtggatcgcgtgtgcgagtatnatacgatgcgtccgcaccatatgctatccagtcaccgccacatagcataacta

SEQ ID NO: 14038 - DNA, 210 bp, Glycine max
  Coding DNA Sequence Number=SeqID_4259
tcatgtgtggccctggtatctgttctcattgctgtgaacaggatcctggcccaatttgctggataggatgcattacactttgagagtcggttgcacccgattcctttcccttaggtcaacgatgatgctttacggtgctgaactgataggcttcatacttgaatgaaaggtacgtcttgaagagcacaggatacttgtgcgagagggtct

SEQ ID NO: 14039 - DNA, 550 bp, Glycine max
  Coding DNA Sequence Number=SeqID_4260
gaatccaaatgtgcattgttcgtgtaacctatataataatgagaaacaagatttttcacaacaataagaaataaaaaaaaaaaacctttaccctactaaccggcccgcaaccactaagttctaaaacccgtccggcaagcccccctaaaattccccgactatgtgctcccttacagacgacgattaaattataaccccccagccctctacccatccctctacaaacgggaagacggccctacaattatcttagcccccccatgtccaatttccccgactgggggggctaacaacgacgcgacacaccccggcggacactaaaaagttgcgccttaacgcacaaaaaaatagaactcccgctcgatttatattaaagcatatcccgaagcccactcaattcaaactgccggcaagctcatgtcgcggccgcgcctcactcatgggccagcacctactcaaccctccaatccttctattcaccccataggatcctgccacatgctacaccccgtcgagtttatgcaccacgtagactacaacgctcggactc

SEQ ID NO: 14040 - DNA, 436 bp, Glycine max
  Coding DNA Sequence Number=SeqID_4261
gagcatagagtaacgctacaactgagcaacagacgtcgaccgcccgacgctgatcgcgatacggctcgagactgaggctcggcggacagagaccgagcgccgcgaagacaagaacagtaaacgcatataatcgtagtgcatatataacgcgactggcggataatatgtgagctgcgaatgacacaccacgtcactagttattttaaatctatctaataatatgattcaacctatacacctacgtccttcctaaaacctcttctgtatcacagctaatatcacgaagaaacatcgtggcggtagtagaacagcgttagaagggacgatggcacggtattcaagacaatatcaactactgttatatcatatcgtcaggtgctccacgcttcctatctaccccctcacagcggagcgcaggatacgtttctgatcatat

SEQ ID NO: 14041 - DNA, 377 bp, Glycine max
  Coding DNA Sequence Number=SeqID_4262
gctcgagctctgctgagacttcattggcgatggctttcaaaatggccactactgggatgtgggtgacggatgagggcaagaactctttcatggaaatgaagtggaagaaggttcatagatacatagtcttcaagatcgatgagaagtcaaggcttgtcaccgttgataaggggggtgggcccggcgagagctatggtgatcttcgccctctgcttgcccgacgatgattgtcgatatgttgtattccactgtgatttcataagcggactttactgactgtggaccaatatcttttgcattgtatggtctgcagctagatcacggatgatacgcagtagtgctcttcgcacattcagagcttgcttgagagcagttgt

SEQ ID NO: 14042 - DNA, 168 bp, Glycine max
  Coding DNA Sequence Number=SeqID_4263
ggaggagcacttggaccttttggcagatcttgttcagaaattctcttcggatcttcgcgccggttttcgccccgcttaagaaaactttaacggttttttccaatcccttgacctggaaggtagccctccaaatttagtttaaagaattctctggttctttggtggata

SEQ ID NO: 14043 - DNA, 561 bp, Glycine max
  misc_feature (105)..(105): n is a, c, g, or t
  misc_feature (251)..(251): n is a, c, g, or t
  misc_feature (289)..(289): n is a, c, g, or t
  misc_feature (304)..(304): n is a, c, g, or t
  misc_feature (318)..(318): n is a, c, g, or t
  misc_feature (333)..(333): n is a, c, g, or t
  misc_feature (361)..(361): n is a, c, g, or t
  misc_feature (409)..(409): n is a, c, g, or t
  misc_feature (428)..(428): n is a, c, g, or t
  misc_feature (439)..(439): n is a, c, g, or t
  misc_feature (484)..(484): n is a, c, g, or t
  misc_feature (503)..(503): n is a, c, g, or t
  Coding DNA Sequence Number=SeqID_4264
atagatgcgcatctagtctccgacgacgtgccaacatacatcatagctcatgctctcgtcgtatgcacagtcgcgtcacgcacgcgcgctgtcgtgcaacacacntgtgctgcatatgtcgtgacatagcatatcgaagcgactagtacatacacacagcacgatcagacacacgtatgcaactcacataatatacaaatctcacagcatactcaccagctatctactatctagacactacacatcactcntctctcacacaactactatcacgcatgaacaaataagncaggtgacgcgacgngagcacgctgagtnggtaactagtcacanctgaggacagaatggctaaaatcgcatngcgatgacagagacagagagactgacacggagatgtatgacacatganaccacacgacgcgagaccngacgacagagntcgcagcgagctgtagcgacacgacgaccgctctatgatgatctngatgagtatgtgtgcatantatatgtacattcctagagacggacgcaacgacaacgacgccaactgtgaacgcctgt

SEQ ID NO: 14044 - DNA, 568 bp, Glycine max
  Coding DNA Sequence Number=SeqID_4265
gtgcattgttgtctctactttatcgccccatcaggtcatggattgaaacccctcgatgtggagtttatgcagaggctacatgataaagtcaatataatcccaattattgcaaaagctgatacaatgacaccagatgaatgcaatcagttcaagaagcaaattttaaatgaaattgcccaacataaaatcaaaatatatgagttcccagacacagatgaggaggaagaagcgaagcaacacaaggccctgaaggacagagttccatttgctgttgtagggtctaacactgttattgaagttgatggcaagaaattgagaggccgaaaatatccatggggcattgcagaagtggagaaccttgagcattgcgactttattgctctaagaaatatgctgatccggacccaccttcaagatctcaaagaagttaccaatagtgtccactatgaaaactatcggtgcagaaaactggctggacttggaaccgatggaaaaccaggaagaatatcaaacaagaacccattggctcaaatggaagaagaaaaacgggaccatgatgccaagatga

SEQ ID NO: 14045 - DNA, 457 bp, Glycine max
  Coding DNA Sequence Number=SeqID_4266
gagtcccctcattataaatggtcttctgtcttcttacatctctttgtcttacttccctatgtagttctttggttgttctcttggtcaacaaacgcaggccaatgcatcggagtttctgtgctagcctatgcattatttgtatttgcagtgaccgtgcagagtatcctcatgtacgatggtgccgtgcacaagggattggatcctaagttggcacccaaaatccacttaaacattgcctcaactgatcgcacagatttcgtcctcagcaacctctatacaatagcctatctcacctacgaagaagagaaagaagaagaagaagaaataatagcaaaattagaagacgacccaaccaaaaatgccaagcaaaaagaaagagagaaagaaagagagagaaagagacacgaaaaatcagcagtagcttatgcagaagatcctaagtatacacatttggcgt

SEQ ID NO: 14046 - DNA, 532 bp, Glycine max
  misc_feature (220)..(220): n is a, c, g, or t
  misc_feature (371)..(371): n is a, c, g, or t
  misc_feature (413)..(413): n is a, c, g, or t
  Coding DNA Sequence Number=SeqID_4267
acccttatcgtatatcttgtaaccgagatgatgtggtgcagaccgtgcttctcgcgcgcgcgacagttatatgtgtgcctgttcgtgattagtacagtgacctcggttctatttccgtcaaacacgtagatccagtaatcgatacatcatgtatctactttctaactaccgtagacgacgacagcgaattatcgtcaacacttcgatggtcagtcactanattatgacagggacgtgaacgtcgacagtgggctgatacgtacgcggaagcagggggtcgtatatacgacattacatcgcagatgaagcaacacagataatacatatgtatagaagggcacgatagtaaataacaccagttacatcagttnaccgaatgagcacagatgatatgtatatatagactgacgtcncatctgtgcggcagctcagtcttcgcgcctccacgtccggagtcgaccagcgttgcagtgtagaccgcttgtcgtgcatgatgcgttgtcggcagcggcatgcttttattactctgtgt

SEQ ID NO: 14047 - DNA, 323 bp, Glycine max
  misc_feature (222)..(222): n is a, c, g, or t
  misc_feature (237)..(237): n is a, c, g, or t
  misc_feature (239)..(239): n is a, c, g, or t
  misc_feature (251)..(251): n is a, c, g, or t
  misc_feature (261)..(261): n is a, c, g, or t
  misc_feature (280)..(280): n is a, c, g, or t
  Coding DNA Sequence Number=SeqID_4268
acgggcacgtattgcgttcgtagcaagttgtccgacttgagactttacttgaggaagccaaacttctgagcgagtaagccggggccataggttctagacataggactcctagccgtagtcaaagtcctcctttgacctaaaagttccaaaattgccgatttccgagtgcagaccgaagctcaaactcctgagacattcgatctacataatgatcagcatgancatccgaactggcancnttgcttcgaggncttgaggccnaacttctactcatcgacangccagaatccctgcttcctactcctgtggcgtgcgagccgaca

SEQ ID NO: 14048 - DNA, 397 bp, Glycine max
  Coding DNA Sequence Number=SeqID_4269
ggatcttctatccatgggatcgtctccatcacagaatggtctgccagctccagcccaagagaaaaaaactgtttctgctgcacctcaagttggttctcttgtacctgaacctatggatctactcggcagtttgtcatcaagtgcatctatttctggaactaaatccactattgctgcacctcaagctgtggatctgcttgacggtttgtcaccaagtacatccgtttctggacttgaagatactcgcccgtcaataacggctttccagagtgcaactttgaagatcacctttgatatcagaaaacagcctggaaagccacaagaggctaccatccatgccacttttacaaatttgacatctagcaattatacagatttcatttttcaggcagctgtt

SEQ ID NO: 14049 - DNA, 533 bp, Glycine max
  misc_feature (49)..(49): n is a, c, g, or t
  misc_feature (52)..(52): n is a, c, g, or t
  misc_feature (93)..(93): n is a, c, g, or t
  misc_feature (114)..(114): n is a, c, g, or t
  misc_feature (152)..(152): n is a, c, g, or t
  misc_feature (339)..(339): n is a, c, g, or t
  misc_feature (408)..(408): n is a, c, g, or t
  misc_feature (449)..(449): n is a, c, g, or t
  misc_feature (508)..(508): n is a, c, g, or t
  Coding DNA Sequence Number=SeqID_4270
tcatattaccacgacgaccgagctacctcgcaacgaatgaatgcggatngcngtactgatgtcgtacttattagatctttacgtctacgatanggagctcttatcactataagnggagtgtgatagcgagatatatctagcatatggcacgntcattatgagtcacacgccgcgtctccggtcgctttatcacggagttactcgcttctagtgtcgagagatgagaagagcgaagtaagatatgcaagcggtatgatgtatagtggttacctcgtattatgtaaggagaggctagcagatgggtaattgtgatatgagaatggcgcgaagcatagacgnaatgacgtgtgagtgagcgcgtgagagagatagagacgtaggaatactagaacgtggcaacctctcatnctcgccaagggcactcgctgagggtgatacacgaaaaaaangatgcatgacgagccgcgggccgcgtccaagccgcgcgtgctccatacactatcaacangattatttctactcgcgagtgtaga

SEQ ID NO: 14050 - DNA, 580 bp, Glycine max
  misc_feature (171)..(171): n is a, c, g, or t
  misc_feature (273)..(273): n is a, c, g, or t
  misc_feature (372)..(372): n is a, c, g, or t
  misc_feature (429)..(429): n is a, c, g, or t
  misc_feature (467)..(467): n is a, c, g, or t
  Coding DNA Sequence Number=SeqID_4271
atgcggctcggagcactcgagagcacgaacgacgatgagatctctggacgcctggccgcgtcggtcgcgtatatctttacgcactctgtcatggcctaccatcgtgcgtgtgtatagatgtcgtcgtagatctgtcccctacctgcccactcgtaatacggacatacacgntgcactgctcactccactcggacgcagtctacgcctcctccgatactatactccatagtctcatcaccagtgacgctagcgcgctgccgtacgatgtatgtngaccattagacatgctgatagatacagagtcaccatgcattaacagagcgatgcgtacatagactccgctacctcgacacatcatatctcacgtcactnggtgatcgcatacgagtgcgcctgcacaatatacttatacattgtatcgcggcaggnactgtctctacaacgtgcgtacatcacctgtgcatgancaggacgagtgacaagaccgatactcaaacgagatgatactataacaaactgtatcgcgctatagcccacacgtctccatccgagacgaatcaccaatagttctctcgcacag

SEQ ID NO: 14051 - DNA, 591 bp, Glycine max
  misc_feature (30)..(30): n is a, c, g, or t
  misc_feature (96)..(96): n is a, c, g, or t
  misc_feature (131)..(131): n is a, c, g, or t
  misc_feature (152)..(152): n is a, c, g, or t
  misc_feature (172)..(172): n is a, c, g, or t
  misc_feature (181)..(181): n is a, c, g, or t
  misc_feature (194)..(194): n is a, c, g, or t
  misc_feature (298)..(298): n is a, c, g, or t
  misc_feature (364)..(364): n is a, c, g, or t
  misc_feature (366)..(366): n is a, c, g, or t
  misc_feature (390)..(390): n is a, c, g, or t
  misc_feature (483)..(483): n is a, c, g, or t
  misc_feature (485)..(485): n is a, c, g, or t
  Coding DNA Sequence Number=SeqID_4272
gtgctcgcacgcagacatcgatataatcanattcgcacgccgtatcaggatcatagtataacgacaagtaaataatgtatagcactcatcgggtantactactacatagtcatacatagctcatgatgacnatgcacacgctagatatagtntacaatacgtatatgcgagnacgatctantgatacggctctncgcataacagtttatcactgagtacgaagacgatctcagagtatatagagcgggatgtaccgagaacgacacaggtatactagatctgacgtggtacagcatgntcgcgaatgttacgagtatcagtgatgtattgtagcgtccgcgcgccatgtagcgcacgactggangnatagtattacgcgctatgcatatnactgtgtgcaacatacactagactgacacacataagacagcagcacgccaagctgtagcgatcatacgtagtattatgtcgcacgtactagantnagcgctgcgacaacgccggcgtatatcagtaatcttgtaacacgcgtacgatatcgatcacgttatagatgacgagcgtctgtcactgcggcatactagatctgtt

SEQ ID NO: 14052 - DNA, 564 bp, Glycine max
  Coding DNA Sequence Number=SeqID_4273
gaataccaacgtacaggccaatgcgaagaaggagccggaggttcacgagatctcggagtcttcgagcagcgactccgcaggagaagcgagacgtgatgagccggtgaaaagcaatggcggaggagtggaagacgctaagatgattaggtttccgatgaataggatccggaggataatgagaagcgataactctgctcctcagatcatgcaggacgccgtgtttcttgtcaacaaggccacggaattgttcattgagcggttttctgaagaagcttatgaaagttctgtccaggacaaaaagaaattcatccactacaaacatctctcatctgtagttagcaacgacgagagatacgagttccttgcggattgtgttcgtgagaaactaaaagcagacgtggcgatggaggaatgggaaagaagcatgacagatgcaggctgataaatacaccggttggaagcaacctgaaccgcgtgtcctgtcctggtttattgattccatctgcctggtcttcaccttttttaataacctccataatgagattgcacatatttcattactaa

SEQ ID NO: 14053 - DNA, 535 bp, Glycine max
  Coding DNA Sequence Number=SeqID_4274
ggctggtttcagcttgtattcccactctgtcgcacagcgtcgcccgtcgccgctgagatcctaggaagaaatggagctctctcgcaagctcttcacggccgtcctcctcgccatgctgctgctgctggccgcaggtacgttggtgcgagcgggtagacgtcttacatgccgtctgtgctggggactcatcaggcgctgtaggacgggggcagcctactgatgatgatctgtctgagatgctgctgcgtgctgaatgcagaggacggaccggtggtggctcacaagagggcaaagaagaagacagagcacatggggggcgcggcgcaagaagatgaagtcggtcgccccgcactttgacaacaagacctggacaagcccccaaggcgaaggcgtataaataccatgagaccgggggaaagaggtcagggggggcaaaatcctaacccacaccacagttggcgattcaacaagcagataacacgcctcacgggcattttttaaaaggggaacatggcgcggacagaccggtaccacg

SEQ ID NO: 14054 - DNA, 407 bp, Glycine max
  Coding DNA Sequence Number=SeqID_4275
cgttgatcggcagattatgaagcatgaggaggatttaaagaaggagtctcaaaaaattgaaacccttaaagataagggtgagaaatcttcgattatgataccagaacttgaaaacaagagttcaaaatggtcgaggttgttgcttgatgaggagaaggtcttagaagaaatcacagagagttccaaagcaaaatatgatgttgcaatatcaacagcatgccatggacttgattatattgtggtggaaacaactaatgtagctcaagcatgtgttgagttacttcgtacatagaatgtggctgtccctactttcgtgatgctggtaggtgcttctcttgcctttgaagctgctcgtttgcggctctaaagcgctgctgaatcttttgaatcgcaaactgccagcattt

SEQ ID NO: 14055 - DNA, 178 bp, Glycine max
  Coding DNA Sequence Number=SeqID_4276
gggagcgcaaacgtcaccgcaagcgcctcgtaactcatgtccgccacgacccgtggcgtgctgcgcccctggcctaggtcgccgcccgccacccggtccggtccccacacgagaaggtgctcttcctcgcaggcgatgttctgcgccccggccggttcgtccactgcgcagcgccgcg

SEQ ID NO: 14056 - DNA, 42 bp, Glycine max
  Coding DNA Sequence Number=SeqID_4277
ctccttcacgccaaagcgcgaaggtcgataactgctgcaact

SEQ ID NO: 14057 - DNA, 506 bp, Glycine max
  Coding DNA Sequence Number=SeqID_4278
gtaaggctgttcaagggagcacaaagaggtgcagcggaacaaggctgctgatcttgatattcagctagctcgcgatgattcaaacatttttaaatggaccgcctccttactcaagggacccctctgacactcctttatgaagggtggccgcggcccagcgttgcatctctctgggtccggaagcagcatcctcttcagcccaccccgaaggcccggatggctagactaagataatttcccccgaaacgggcagttgttaagaactggacgaaatgttccccgaggaatatctggcaaaaatggcttggcagccccccactttggacaccttggaatcctggccggcaaggaccggatatttggcgggtccttggggccaatgccagaaacctggaccgggcccagtggaatttggaattgcccgtgcaatccctccgggcgttccgaggaaaatgttcaaaagcggccccccacccctgcagcgcaggaagcgaacgaccagacat

SEQ ID NO: 14058 - DNA, 363 bp, Glycine max
  Coding DNA Sequence Number=SeqID_4279
ggcaatggaggacaaccacgccccacccatcgattccttacacttcgaatctaacggcgtctctcacggcgccgaccacggctggcagaaggtgacctacgctaagaaacagaagaagaagactgttaacgccgctaacggcggccccgattcccgcgccaattccagcaagctcgtgagaatggcacgcaggggcggaacgaggacgagttaccgggagatcgaagcgcaaacggagggacgcgaccggaaagattaggaggcaaataagaggggggatggcggagaacacgagaaaaagccggggtcggagcggagcaagggcatcaaaaatagggggagaaggcgcacgacgaggacggg

SEQ ID NO: 14059 - DNA, 492 bp, Glycine max
  misc_feature (240)..(240): n is a, c, g, or t
  Coding DNA Sequence Number=SeqID_4280
ctgtcaaaacaaccggtcactctaggtacggagcacagtcccccttccgaagtctggtcccgttagcctcagcagtatgactgatccctggtggctgctgatggagggcgagcgcattaccctactacactgtgcaagtcaatagactagcctctagcaaccgacactgaaggccttcgcagcataacggaccgtgccatgatcaaaagagcacctgttcactgacgatttaatatctgnctgggcgctattacggagggcagctaatagcgatcgtagcgctgcggaaggtttccccctggctgcggcgccactgctagaactggatgtgtcggcggtccgctataaggttccagctgtgactgcagtgtaaacgcggttctctggcctagggagtatataatcaagcgagactggtgctgcgtgttggaatattctctgccagacaccgcgcgggcatcccaccatagtatcctaggaggcgggcacgct

SEQ ID NO: 14060 - DNA, 545 bp, Glycine max
  misc_feature (155)..(156): n is a, c, g, or t
  misc_feature (158)..(158): n is a, c, g, or t
  misc_feature (485)..(485): n is a, c, g, or t
  Coding DNA Sequence Number=SeqID_4281
taatattgcgtcagcgctacttccttctttctaattttttcatcatctaactcctccacactcacctcatgtcctccatcgcgtcgctgatacttactgttccgtcatatttcctcattactactcatttctctcctataattacagcaggttgnncntcactagccaaacacgtagcccctccgcctcacccgagcgccacccacacgcctcattcgcttttcctgccctcttatatatgagatgcattatactactgttatccctccgtatctccgcctctccaccgtccgccatcggccatttgaactccacccttcacctcgtggccggttccgcgtaggagaatactacacctcccgtcgtgtgtgttgctttctctggtggtatatcattgtgtgttgtgttgttcggctatagtcgggggtgtggggaggaggcacccagcgccccgcgctccgctactgtctcctgcgggtgcgcgnccgacccctacaagtatagattgtgttcttgtactccgcttccttcccagatatgttgga

SEQ ID NO: 14061 - DNA, 384 bp, Glycine max
  Coding DNA Sequence Number=SeqID_4282
gaaacagctccagaacttccaagactcctcttaaccctttcgaaaaggaaagactcgatgccgaattggaaattgtcggtaaatacggtttgaagaacaagagagaagtctggagagtccaactcgttttggccaagatgagaaaggctgccagagaacttttgacccttgaagaaaaggaccccagaagactcttcgaaggtgaagccctcatgagaagatgcttcagatacggtctcctcaacgaatctgaaaacaagctcgattacgtcttgggtttgacccccgctagattcatggaaagaagactccaaaccgtcatcctcagaaacaacttcgaagccagatctatccaccacgctagagtcctcatcagacaaagac

SEQ ID NO: 14062 - DNA, 394 bp, Glycine max
  Coding DNA Sequence Number=SeqID_4283
catacttgcaattaactatcctggcacaaaacatccccccacctcgcccctccacccacacccacaaacgcccccactccatccgccgatattctctcccctttgtttcccctaccccgcgggatccccacaacctcaaaacggccccccccccgcgcggacacccaaccctctggtcccctttagagcggcgccaatttctccgtctcttcgggccacccctcgttctccccccgtctcccctgggggacaatccctccccccaccacaatttccaaccacacacctcgacccccaacctcaatcgggaccaatatttcccgccccacaaccacgaaacccatcacccacacccatccgcggcgtctttctccagtccaattttctacgaccg

SEQ ID NO: 14063 - DNA, 558 bp, Glycine max
  misc_feature (47)..(47): n is a, c, g, or t
  misc_feature (74)..(74): n is a, c, g, or t
  misc_feature (125)..(125): n is a, c, g, or t
  misc_feature (143)..(143): n is a, c, g, or t
  misc_feature (150)..(150): n is a, c, g, or t
  misc_feature (246)..(246): n is a, c, g, or t
  misc_feature (339)..(339): n is a, c, g, or t
  misc_feature (376)..(376): n is a, c, g, or t
  misc_feature (383)..(383): n is a, c, g, or t
  misc_feature (498)..(498): n is a, c, g, or t
  Coding DNA Sequence Number=SeqID_4284
atagcatagaactgtaagacgcaagatgaatattatcaagacaaaancaatagtgatatatttgctcgtgtctngtatattttataacgaaatacgacatatatatagagggtgtgtgagtgatntcttctttctgtagtgtnatacaancctacgactccacgcagagacgtgcgtgtgcgcgtatagcgcactagtagttatataaataggaaatcattgcgataagtgcacagctagtattcntaaactataccgtgaggggaggtgacgcaagatcaccgtacgcgcggcacgagccacaatcaagtcagagagaagggtagctctcgtgagcantgagtgagtattgactacaagagtcgtggcggggagnagaactnagggcggcatagtgactgcacgtctctccaccgctcccccctacctgctagcggagcttggtatgtggcatgccgctaatagagtgagtatgcgcgggccgcgggcgcaccccanacaccacttaggcggttctttatcaccatgactctgacatacgcgcgcatcgacggctcg

SEQ ID NO: 14064 - DNA, 138 bp, Glycine max
  Coding DNA Sequence Number=SeqID_4285
atattagcgggctatggcccagttcatattagccgaagcccaggcccttcatttttcagttggaagaaacagccggagcaaagcccacctaccttgcgcagtttgacgagcttctcgagatctgctctctgcaggaaa

SEQ ID NO: 14065 - DNA, 571 bp, Glycine max
  misc_feature (37)..(37): n is a, c, g, or t
  Coding DNA Sequence Number=SeqID_4286
tttctgctccctctaaatatccaatcgacatagctcnccccatcgatatcatacgcgccacgtgatagatcaggcgctcagtcacacatctttcttctctgtgtgggaagtgagaggcgagacacactcacctgcatgctcgcagtcttttcgttcgcaggtcgcctgtgtaagctacactggggctagcgccactatcctcttcttcctaggcatctttctagccatcacacggttatggagtcttcattgtttatgtttatcaaggtaatgagtacggctgccgtgattaacactcccggagagccgatcatccctggggctgtctggatgatagtatcgatggccggcgcgcaacctaaacctcactactccttccttcttcccgcgtgagacaacaataagccgcgccccactcatcgggtcgacgggaggctattctgacgctacatttggcgatctcacctcgccctctggggaaaaatcacaatacacgacgggagggagggtgctctagcgtagactgccctccgaggtggggagacccgtgtaccccaatttcggcaatggg

SEQ ID NO: 14066 - DNA, 504 bp, Glycine max
  misc_feature (68)..(68): n is a, c, g, or t
  misc_feature (142)..(142): n is a, c, g, or t
  misc_feature (175)..(175): n is a, c, g, or t
  misc_feature (220)..(220): n is a, c, g, or t
  misc_feature (222)..(222): n is a, c, g, or t
  misc_feature (231)..(231): n is a, c, g, or t
  misc_feature (243)..(243): n is a, c, g, or t
  misc_feature (294)..(294): n is a, c, g, or t
  misc_feature (317)..(317): n is a, c, g, or t
  misc_feature (329)..(329): n is a, c, g, or t
  misc_feature (377)..(377): n is a, c, g, or t
  misc_feature (384)..(384): n is a, c, g, or t
  Coding DNA Sequence Number=SeqID_4287
gtttcgtcgtgcttctgtatgcctgcgtcgatattgattgagctggatgatacgcatgtgatggagangcgtcgctctcacttctcgacccgtcgcgtctacgatgccagacgtatagacatgcgattactcagtcatcatntcgagatatgcgcgtggtacgatcaacgcgccnagcgcgcgtagctcagctgagacgtgttcatatgtatgactgatntnagtgtgtcnagacgagtctantgatgactgatgcagcgtacgtctgacattgatcgtgatgctgcgctatcngcgcaagtgtatgtattcgtatngattacatagtncatgacgatctatcttcacagcacgcgcgactccgtctagtcgcatantctgacnctgtctgtgacgcagtgtgctctgatgatagctgtcagcatacgatggaggaccaggtggagtactacgtgacgacctgtgaacagcatgcgcaagatactaaactctatgcgcaacaga

SEQ ID NO: 14067 - DNA, 550 bp, Glycine max
  Coding DNA Sequence Number=SeqID_4288
aatttgccggtgctcgcgtacctgacattcggcaaagcgtgggcagttgacttcgcgagcggcgaggaaggtttgttgatggcgccggcgtacgcggtacccgccatgttgaaggatgccgggctgacattgcaggatttcgactactacgaaattcacgaggcgttcgcgggccaggtgttgagcactcttgcggcctgggaatcccccgagtattgccgggaggtgctgaagttaccggcgccgctgggcagcatcgatcgcagcaagctcaatgtgaagggcggcagcattgccatcggccacccgttcgcggccacgggaacgcgcattgtcagctcattggccaaaatattggcgggtgaccccaacgccaggcgcgggctcatttccgcctgcaccgcaggtgggatgggggtaacagcgataattgagcgctgaaccgcggcgcgaaccaggaccccggctccgcgcgaacgttttcgcgccaatgaacgatagtgacagcgatagtcgagcgctgccgattgtgatcctggtctgattcctc

SEQ ID NO: 14068 - DNA, 166 bp, Glycine max
  Coding DNA Sequence Number=SeqID_4289
ttgatcttcgtgttcaccggatcatgttccggcatcgcctacaacaattttaccgacaacggtggcgacactcccgccgggctcatctccgattccatcgcccatgctttacacctcttcatcgacgtctccgactgcgccaatgtctccggcggacacgtagacc

SEQ ID NO: 14069 - DNA, 568 bp, Glycine max
  misc_feature (32)..(32): n is a, c, g, or t
  Coding DNA Sequence Number=SeqID_4290
gtgtgtactaattcgtccctggtgctcgcgangacgcaggaaagtccgagatggtacacgcgcaacctcacactgtacggacctaccacagcacatcggccgcactgcgcgaccagtcacgcatccacacctagcatgatcgtgatcaaacaccacactcgcgaggcatccgacacatcctgggtgacgtgcggcggcacccaaccagcgcactccaccacctactctgtacacgcaagagatgaacgacacacaacaagctatcacgacacagacacatgaacagaacagccacagagacattagggaaccgactctgcagatcgaatgtagcagcactatgatgagcgcgagcgcacagctacacgagcacgatgagtgtagacaatatggctcgatcaacgcatccagcggcgctccgtcgtgtgcgtgcagctcgacgtccaattacgctggcatctgaggagcgtgacgatgcgatctctgcaccacgcgcgagtggcgatccacaccgtatctgactcaccactactcgacactcacgcttgtcagtcgatctcacagcgtg

SEQ ID NO: 14070 - DNA, 453 bp, Glycine max
  misc_feature (27)..(27): n is a, c, g, or t
  misc_feature (66)..(66): n is a, c, g, or t
  misc_feature (425)..(425): n is a, c, g, or t
  misc_feature (427)..(427): n is a, c, g, or t
  Coding DNA Sequence Number=SeqID_4291
cgcttagcaccgctatgctgtatagcntactagatatagcatcacacgcactcatgtgtgagtatntagacacggatacaccacacgcaacctcacgacgatccccccgtcgccacagccaccctcagtcctatatacgaccacaaggcatattatatctatcacatctctcttcctcactctcacctatcttattcttttgcactagtgtagttgtgtcggccgtgttgtgacaggtaataggagtctgatctgcgcctacgctcggttggtgcggtcactgcagttgtacgaacaagacactcctattactatatcatcacatcactatgctccctccatacctcattcatgtctaagcaggtagcggagtcacctaccacgattgtatcgtagtcagatgtggatgggagtgcgcagcgtangncctcttacgtagatccacgatgccat

SEQ ID NO: 14071 - DNA, 523 bp, Glycine max
  misc_feature (432)..(432): n is a, c, g, or t
  Coding DNA Sequence Number=SeqID_4292
atgagacaggaacttgcccatttgaagaccaattattctcaatcacttaatgactttcaaaacacagaaaaagcaaatatcgaacatatgcatactacacttgagattcatgaagcaacccacgcacgcaaccaaaaggaaatcaatcagctaaagcgcaaagtttctacagctcagaaaaaagacacaaaatcaacggcgaggattgcagaattagaaaaggaagttgagaggatcgtggaattagaagagaaagttgcaaggaccgtggaattagaaaagaaagttgacaggattgtggaattagaagagaaagttgcaaggactgtggaattagaaaagaaagttgagaggaccgtggaattagaaaacaaagtcaaggagctagaacaaaaattggcaacacacatccaacaagggtatactcacttnggctgagattaacatgctcaagaaaaccaatggagaggtggaaatgactgctcaatgtttacgtgcggatattcatcagctcaatgacgaa

SEQ ID NO: 14072 - DNA, 592 bp, Glycine max
  misc_feature (433)..(433): n is a, c, g, or t
  Coding DNA Sequence Number=SeqID_4293
ctttcgtgtatagacttgcgttcgttgcctagtccttgattcttctgtggtgtgggtattgtgatgttgtatgatgtagttatataatctcgtcattgtaagggtagagtaggtatatgttctatgttctatatttttttcgtccttattatactttggtcgatgttagatatagtttgggtgttgtttgtgtgtgggagtctgttgcggtgatggcgtgagcagaagccgcgtagacgaaaggcagtgaggcggcgatgtcacgcgggcgcgggtgaagaaaagcacacgcggtcgctgcgaggagttggtatgtggtgtatgtgtgacgataataaatattgaactcatcggtccactccttttttactctataattggctctgttggtagccagaacacggactcccctcgagggggtacatattctctngtgtcgcgtctcaggcagaataacttgatacactatagtataagtgttggattgtgtagtcggtgcgccgcctcagggggggcggggggggatgtcctatgtggggagataagcacgaacttatgtgttctcgtgatgaatttgtgtgttgcgtcggtt

SEQ ID NO: 14073 - DNA, 485 bp, Glycine max
  Coding DNA Sequence Number=SeqID_4294
ggagtcatgagctctgaaagtttacttgaaaatcctgctttattcagtggaaaagtctataatttagatcaacttgctttggaatatttggacatttgcaagactttcaagactgatcctgcttatattagacctcatctcttcaagttcttgttcactggcttacagagaaatcctgaattgagagaagaattaggaagagcaagaacaatggaggaatttttggatatcacacatagattgcataaattgagaattgcagagagtccagagagtaagattggatggtatgagagatatattccagctgaagataagctctactataatgattacagaatcactttcaaacaaactatatctattgaagaaagcaaagataatttcggaggtgaaaagaaagttgtcgttgctgttgttgaagaaaaagctgatatggatttaggtggtatgtttgaataattattatgtctctcttgcttagt

SEQ ID NO: 14074 - DNA, 335 bp, Glycine max
  Coding DNA Sequence Number=SeqID_4295
gttccatacaccacgcgtgcactgacggcggcgttccggcagcctggttaccagcctcctcagccatgcacgtcgacccgccgccaccagcagctaactcgcacccgccggcgccggagccgtccggctggacgcggcagaaggacaagctgctggagctgctgctccctcgcatgtacccgcaatgggatcgcatcgccgagcacctcggcggcaagactccggacgaggcgcgccggcggcacgagtccttggtcgccgagctgcggcgcgtgcttgaggcgccaggggtggagacgccgcccgagtggggttcgcggcagcctgctggccgt

SEQ ID NO: 14075 - DNA, 66 bp, Glycine max
  Coding DNA Sequence Number=SeqID_4296
aatcagggttgctcatcggatagcttcaagcaccttgtgcctcaggttacttaggttgcataggaa

SEQ ID NO: 14076 - DNA, 585 bp, Glycine max
  misc_feature (27)..(27): n is a, c, g, or t
  misc_feature (47)..(47): n is a, c, g, or t
  misc_feature (58)..(58): n is a, c, g, or t
  misc_feature (71)..(71): n is a, c, g, or t
  misc_feature (102)..(102): n is a, c, g, or t
  misc_feature (141)..(141): n is a, c, g, or t
  misc_feature (147)..(147): n is a, c, g, or t
  misc_feature (151)..(151): n is a, c, g, or t
  misc_feature (158)..(158): n is a, c, g, or t
  misc_feature (161)..(161): n is a, c, g, or t
  misc_feature (163)..(163): n is a, c, g, or t
  misc_feature (175)..(175): n is a, c, g, or t
  misc_feature (189)..(189): n is a, c, g, or t
  misc_feature (225)..(225): n is a, c, g, or t
  misc_feature (247)..(247): n is a, c, g, or t
  misc_feature (375)..(375): n is a, c, g, or t
  misc_feature (444)..(444): n is a, c, g, or t
  misc_feature (537)..(537): n is a, c, g, or t
  misc_feature (557)..(557): n is a, c, g, or t
  Coding DNA Sequence Number=SeqID_4297
atctcgcgatgtgtctactcgattaantcactgtccagatatatgangaggttagttncgatgatgcgtcntgtgttgacgcgactacgtgtctcctggtanctacgacatatctatatactactcgtagatatgtgtgangacatnatgnagatcangcntntatgtcgttcantcaggttgcactcnactgacgcacatcactactagactatacgcgtgatnttcgagtagatcaagttatgtntacgtagatatacgttacttacggtgagatatgcatgtctatctcgtttactacctacactctacatatatatatcctgatgatctatcacaatcatctatatagactatcatcgcagcagacagaantaccactctgtctactacttacatacgtcggtcactgtcgctctattatagtttatgagtagtaatagntggtagcagagatatgatgaatgaagactagacatgctcggacgatgccgacgacctcaactatcagacgaagtacaagactgagactgaagnctacaccacgactgacagcnggagtactactatatactcgacagtcta

SEQ ID NO: 14077 - DNA, 431 bp, Glycine max
  Coding DNA Sequence Number=SeqID_4298
ggttatctggattcttagtgtttgtggtatcgaacacacgctccattgcttaagattttaacataaatcgatttatgtgttcggttcagcgaattgttgttttacttgtggcttgcttcgcctttgttctctcggcaatggatttcaattcttttttttttacgaatagaactgctgactgccaagtgttcgttgaaattcctctgagaggtggaattgttatgtcttttaacagttacttgactatgttcatctgttttcttttttctagcaggtccgaaagagccttgtttcagcagccatggccaagcatcatcctgatttgatcatgtgccggaaacaacctggcattgccatcgggcgattgtgcgagaaatgtgacggcaaatgcgtggtctgcgattcctacgtgcgcccgtgtacgctggtta

SEQ ID NO: 14078 - DNA, 571 bp, Glycine max
  misc_feature (99)..(99): n is a, c, g, or t
  misc_feature (216)..(216): n is a, c, g, or t
  misc_feature (434)..(434): n is a, c, g, or t
  misc_feature (442)..(442): n is a, c, g, or t
  misc_feature (480)..(480): n is a, c, g, or t
  Coding DNA Sequence Number=SeqID_4299
tgactgcaaccacataactccacgatacatgcctctgcctaacttgagaaaacacatcagtactcacaccaaattatcccaggcgttccatctatattntttgcgttgatttgagcacgcgaagatcgtgaaagaagaagctctcaacaatgtacacagacccacacacaccttcaacacaatgtaggatataagactaacatagatactgtctangtctatatatactcgtcacctaccgttaccaacagaaagaagaccgaccccacaattctctcactaccaccactatcgatgtatctcgacgcgcctccggcttatatcgttcttcaataaccgtcataaaccatacacaataccatcacatacagaggagtcacttcgcaatcatcctctacctctcaagaataaatatacacgtccacttctctccncctcggancacagaagataccacactcctcctacacaactccacanagatcaaatatcatatacatttcatcagagacataccacaataaacatacacataataccaatatcatgacacagcgataacactacccaa

SEQ ID NO: 14079 - DNA, 558 bp, Glycine max
  Coding DNA Sequence Number=SeqID_4300
gcaggattcggtactttgctcggaagagacttgatgttttctgggctttattgggtgttggtggaaaatatcagaagacatgtgaagagctggagccaacaaaatgaagagggatatcaagataaaggaagtctattgctttctaatgtgattgccggtggtttggcaggaggaatatcagcatccgtgacattacccttggatgtggtaaaaacaagaaaacaattgaatccaaaagaatataagaagaaatccacaattcgaattctcaaggatatctattataatgaaggaaaggatgctttgacagcaggtatgagacaaagagtgaccaaggttactatggcatgtgcaggcatcttgacattatatgagctcttctctgacatgttgagagaagacaatgtttactgagtggagtagttaggtttgcttgattgattttttaaattaaatattttggctgatttcgtacatttttattgtaattttagctagtgctcttcctttcgaataatgtctttttatctctttgtttatttatctatccctgtataa

SEQ ID NO: 14080 - DNA, 582 bp, Glycine max
  misc_feature (110)..(110): n is a, c, g, or t
  Coding DNA Sequence Number=SeqID_4301
gcttctaatgcgttatgccatcctaccgcatgatccgtatcgcagcttacgataccgtaacaacgggcgcgacgctccacaccgctcccgcgttcaccagcacccccgcnccacgtccaacgtgtatcgtcaacccgcactgcgcggcgacgcatattatataggttgtgtcgttgtcgcgtttctgctcctctatccatctccgctccctattacgacctctgtcgcgccaggtatcgtctctcagcgcccgttcgatcttgactctcgaagcgacgcgataaatagggtcgtactccgctattagttcgtccttctcgctagtagtagtatatatccgcggtcttcgtctggaccgtgttgacgcctccgcgctcgcaggggccggtttaagccattcgcgcactcgaacaccaataaaataggggcagaacgtctccaggcctagacgtcaatataaacagtcaacagcgctcgctccgggcgctacacgagatgctacacgaaagcaaaccgaaactaataataatatgtactgtgcctaagatcaggtgaagagatatggtgcgtcgcgcgtcgtaa

SEQ ID NO: 14081 - DNA, 546 bp, Glycine max
  misc_feature (361)..(361): n is a, c, g, or t
  misc_feature (386)..(386): n is a, c, g, or t
  misc_feature (431)..(431): n is a, c, g, or t
  Coding DNA Sequence Number=SeqID_4302
tagacattcttcacctctagttctgcctctgatgacatccaagcgtggaccgcacgagtaatatcatagttaactgatccggttctgtctacgtcacccacccctctgtggtgtcccgcagatatgttaccccgcttctagattcagcataataggcttgctagtgtacgacctcgactctagatcatgcatagagacaagattatagttttggtgatcacatactgcatctgcctgtacattgtgattgcatagtactgcatccagagagagagtagcaagaatgcacgttcatgtatctgtgcgagagggctcgatgacactctaatcgtggtatagcatggattgacgtgctcgtgcntctgcatctcatctatgtcgcatcnctacgatatgacattcctatctagcactgctcacagaccactagntatgtatcattgtacactactcacacagacagtaaacctatctcgctgttgtgtctcacaccgtgccttttacagcgagactctgttagacgctctgtagcgtcgaactatatta

SEQ ID NO: 14082 - DNA, 552 bp, Glycine max
  Coding DNA Sequence Number=SeqID_4303
gattcatttttcacgcggtgggaaagcataattcagcaactgaaggacgatgaacctcaagcgtacccaacttatgcacaagccatcaaagacattcaaaccgtggtgcaagccgtcgcacaaaccacgtctgtaaatggccccgcgccgccaatcggatcaaactcccgagctccctccacacagcgggccgaaccgcgtggcatcggaccgtcctttcatggtcttaatactggcacttcatcgcatacaaatcgagtctcgaaacgtgaacctaaacgaccgtcctcgaatagttcaggacaaaatattgctgttgccctacgacagttggcagacaaggtgaaggacaaaaaggtcgattgcccagtctacaaacaccaccttatgcacaacaccttacccccgtgctcaggttgctctgtgaaggttatgtctcagatccgaagtcatctcaacccaaaccgtgctgcgggtacacacaacggctttccccgatttgtggagcagtgccatcgctgcaagcaagactttgtcgaactacccacttat

SEQ ID NO: 14083 - DNA, 582 bp, Glycine max
  misc_feature (26)..(26): n is a, c, g, or t
  misc_feature (34)..(35): n is a, c, g, or t
  misc_feature (38)..(38): n is a, c, g, or t
  misc_feature (46)..(46): n is a, c, g, or t
  misc_feature (72)..(72): n is a, c, g, or t
  misc_feature (98)..(98): n is a, c, g, or t
  misc_feature (189)..(190): n is a, c, g, or t
  misc_feature (193)..(195): n is a, c, g, or t
  misc_feature (199)..(199): n is a, c, g, or t
  misc_feature (234)..(234): n is a, c, g, or t
  misc_feature (237)..(237): n is a, c, g, or t
  misc_feature (239)..(239): n is a, c, g, or t
  misc_feature (259)..(259): n is a, c, g, or t
  misc_feature (274)..(274): n is a, c, g, or t
  misc_feature (289)..(289): n is a, c, g, or t
  misc_feature (295)..(295): n is a, c, g, or t
  misc_feature (303)..(303): n is a, c, g, or t
  misc_feature (306)..(308): n is a, c, g, or t
  misc_feature (354)..(355): n is a, c, g, or t
  misc_feature (363)..(363): n is a, c, g, or t
  misc_feature (402)..(402): n is a, c, g, or t
  misc_feature (433)..(434): n is a, c, g, or t
  misc_feature (539)..(539): n is a, c, g, or t
  misc_feature (543)..(543): n is a, c, g, or t
  Coding DNA Sequence Number=SeqID_4304
tagtattagtaagcgcttgacgtctnactattannccncgcttggntcccccgccctaaattctaatatatngaactctgctgttgtggctctatagnctacgtactatcgaaactacaacacacccgagctgaaatgcgggctgccgaggataagtagtgctgcgatgtcgcgcgccaccggcgtganntcnnncatntctccactgtgtgccgcctccgtaagatctatatnatngnactccgccgccacggagagncgcgcagacttattntcccgttttcacatntcaatnactaatanatnnngtctacgatagctgtatcgctcgtctgcgaccgctacggagtatgnnttatgtcntgcgcagcgggcccacacgcgtccgcacatgaaaaatcncacacacgccgaccgaaatgtgatgcgtgannctgtgtctcgccgcctgcgacgcgagtcagtcgctaatatatgatcactgtacatatactcatactctgcgcactcgaccgtagtggatttacgcagcacgttanattnacttataattacttgataacgcgccgctatgcgatcaca

SEQ ID NO: 14084 - DNA, 345 bp, Glycine max
  misc_feature (245)..(245): n is a, c, g, or t
  misc_feature (273)..(273): n is a, c, g, or t
  Coding DNA Sequence Number=SeqID_4305
ttgtagcccctttcaattcccataacaaatccccggatatttctttcccaggaatctcgaaaaaactaatgttcaacggacccaagggtttccggtcgccaaaaactttaccaggccctgggggccggcgaaattcttcctggccctttcctttcggccttcctacccgagtttttgaaaccccaaaaaaaaaaatggaggtccccagattggggcccccggaattattgggtcaaagggctttncctcccaaagggggggacaacaatgggnccccgcgggcgggcccgaaaaaaaaattttcacaaccccccttttaagctagcgtttgtagattccccaaaa

SEQ ID NO: 14085 - DNA, 483 bp, Glycine max
  misc_feature (456)..(456): n is a, c, g, or t
  Coding DNA Sequence Number=SeqID_4306
atgaatcatagtgtggtaacgctccactgatggtgcgcttagagctttgtggaatggtctattacaattgtatagcgcactattgagatgaacggtatattcaggtggtaaaagcacaatagcctcactagtgtactcgatagtgccattcatgggctcaattcatcctagggacgcgaagatatgattatatgaatacttcaacctatcttgtaaaggtcaaagcaatgactagctggaccgacttctgtgtgagaaggtcgtgaacttcgcacgcacatattaggcctcgtagaactcagaagaagcacttgttgatgggacactatcttataacagatatagatacgttgagcgagagtagacaacgaagaagagaaaaatggtaattcctctgctaagtcagcgggggggatactcaccctagtctgctgtggagcgggcgcaggccaagcngaggatggagacctcccagatctcttt

SEQ ID NO: 14086 - DNA, 485 bp, Glycine max
  misc_feature (40)..(40): n is a, c, g, or t
  misc_feature (42)..(42): n is a, c, g, or t
  misc_feature (64)..(64): n is a, c, g, or t
  misc_feature (107)..(107): n is a, c, g, or t
  misc_feature (278)..(278): n is a, c, g, or t
  misc_feature (373)..(373): n is a, c, g, or t
  misc_feature (443)..(443): n is a, c, g, or t
  Coding DNA Sequence Number=SeqID_4307
agtatcccctctctccttggtttattctattattttattncncatcattcccctactattctcntacgtctccttcctcatgctcctcgagcccgcgtggtaacgantcgtttataacgaaagaagcaggatgggccgcgcgcgaccgccgcctcctggcgcgtcattgttctcttacccttttcctgcgtatgctatctctagaagcctcgtctctatcgccgttgtgactgtcatatcttctcgtggtctctactctagagtcggagcattaagtntcagtagatctacttctctatacacactggatgtgtgtgggtggggcgatgtaagttaggtggtagatacgaccgcgcgccgcgctcctcgtggngggtgggttacatcaatccaacacataaacaaatgtggtattgtgttctatctcctattctccactactnttatatcacgacgatctctgacagagtcttctgcgtatactg

SEQ ID NO: 14087 - DNA, 331 bp, Glycine max
  Coding DNA Sequence Number=SeqID_4308
gcagaattgccggactcacgcgaaccctacagagatatcaacaaaggccccgctgagaagttaaatcgagggccaaagccaagaacattggacggccgcgaatacgaaaggaaggcgccagacaactgtgcggcccacacggaatccgctgggacttacagtgaagcaaaacaaaaagccaacgaggaactcacaaatgcccacaaggatcaaaatctcccaccagggtccactggtttatacaaacaatcacccaccggaacaaaggggctaagtcaccccaaagatgagacaaaacccaaaaatgagcaagcagcgaaagacaacaaac

SEQ ID NO: 14088 - DNA, 553 bp, Glycine max
  misc_feature (184)..(184): n is a, c, g, or t
  misc_feature (202)..(202): n is a, c, g, or t
  misc_feature (300)..(300): n is a, c, g, or t
  misc_feature (303)..(303): n is a, c, g, or t
  misc_feature (326)..(326): n is a, c, g, or t
  misc_feature (335)..(335): n is a, c, g, or t
  misc_feature (359)..(359): n is a, c, g, or t
  misc_feature (425)..(425): n is a, c, g, or t
  misc_feature (448)..(448): n is a, c, g, or t
  Coding DNA Sequence Number=SeqID_4309
tctcaccacattacatacacacgatcatcctctctctcccgaccactccatctcctatcataccactcaacacccaatctatcactctcttatctatttacatgttaaagctctttctcactaatatcatctccacgctatacacactcactactcatactactataactctaaccctacacanacacgacataatatacgnaaaacactaactaatccataaactatatatatcacatctatataatatcacactatactatcacaactaaataatactcatatcatatctactctccncancacctcttcacgtatcttatctnatgcttctntttcactgtttcctcctcttatanatatctccagcactactccatatatacaaaatattaacctccacatctcacaaaatcaccacatanagctacgaccatacaatcaaccnaacgacaacacgcacacaacacacatatcacctctgtctcctatactactctaccatctaatcctacaccacatgccatctatgaacccactaactcatcacgca

SEQ ID NO: 14089 - DNA, 550 bp, Glycine max
  Coding DNA Sequence Number=SeqID_4310
ttttctccacttcacaatggcttggagcccgcatctgagatcaagctcttggcaagtggacgtacgatgacgtcgaatgcaacgatatctccctcacggattacgttgctgtgaagcaaaagtacaagtaccagtcctacctcccccacaccttgggacgttacaacaagaagaggttcaggaaggcacaatgccccatcgttgagcgtgttgctaatgccctcatgatgcacggaagaaacaatggaaagaaattgttggctgtccgcatcctccgcaacgccttcgagatcatccacttgctcaccgaccaaaaccccatccaaatcctcgtcaatgccatcgtgaactccggaccccgtgaggattccacccgtattggatctgccggtaccgtccgcagacaagccgttgatgtgtcccccatgaagcgtgtcaacatggccatcttcctcctcacctctggagcccgtacctctgctttccgcaacatcaagaccgctgctgagtgtctcgctgacgagttgatcaacgccgctaagggttcttc

SEQ ID NO: 14090 - DNA, 208 bp, Glycine max
  misc_feature (78)..(78): n is a, c, g, or t
  Coding DNA Sequence Number=SeqID_4311
ttttgggttgtcatcaatggcgaatcaaagacaaagttgcagaatcaggaatggatcgtcgacaacagctccgtacgntgtttgtttatgctgagtggatctctggtcgatcgcctacacttgtctaaacctggaatgaaaaccagggccgtatcttccacgccaggttaaccgctcaggccctgaggttggcccctctaaattggga

SEQ ID NO: 14091 - DNA, 98 bp, Glycine max
  Coding DNA Sequence Number=SeqID_4312
aagaaatgtaccaactggcttatgaatcaatcgcttggaataacgcccgaaacacacatggccaaggggggtctctattacccacaatctttgattca

SEQ ID NO: 14092 - DNA, 267 bp, Glycine max
  misc_feature (26)..(26): n is a, c, g, or t
  misc_feature (32)..(32): n is a, c, g, or t
  misc_feature (40)..(40): n is a, c, g, or t
  misc_feature (50)..(51): n is a, c, g, or t
  misc_feature (84)..(84): n is a, c, g, or t
  misc_feature (91)..(91): n is a, c, g, or t
  misc_feature (94)..(94): n is a, c, g, or t
  misc_feature (108)..(108): n is a, c, g, or t
  misc_feature (113)..(113): n is a, c, g, or t
  Coding DNA Sequence Number=SeqID_4313
ccaaaaccacagaagcagctccaggntctggncctcgtgnattccacttnncacgatcacatcatcgctgccgagaagcgcttnctttcgncgncagaactggttatngtcangagcaggtaaccattggctccgggcctcctggctcaaagggaagggggttccgtttatccagaaagaaggccggggttattaaaccccgttactttgggaagaaaaccccttttccccaaccttgggagagaataggggattctcgcccccacg

SEQ ID NO: 14093 - DNA, 402 bp, Glycine max
  misc_feature (101)..(102): n is a, c, g, or t
  misc_feature (270)..(270): n is a, c, g, or t
  Coding DNA Sequence Number=SeqID_4314
tgagggcatttgaaaacaggttggtggtcctatgattcaaattcccacagggagaagagatggaatggtttcagttgcttcaaatgtcagacccaacattnnttggacaccagttttacaattggatgaagattgattaaccgcttctctttgataaagaagttgtcccttgggtttgaccttgtcattcctttccaggtgccatatttcgttccaaggggctcaccaccatagggaacagcgttcattgcaggctcatttcagagatanggttccaagaaagactccaaagggaaagcctcacaccttcattgacaaaaaccccttgacccagtaccttatggcagataagcttaatggcaagaggtggtcccctttaagtgcaagccctttcttgttcaa

SEQ ID NO: 14094 - DNA, 508 bp, Glycine max
  misc_feature (286)..(286): n is a, c, g, or t
  misc_feature (319)..(319): n is a, c, g, or t
  misc_feature (381)..(381): n is a, c, g, or t
  Coding DNA Sequence Number=SeqID_4315
ggatgctcagagtcatagtgtggtagagaatcaagacaagatgcaaccatgagtactatgaagatcagtgatcctacagagtatacaactatcatatattaactataacaaactataatagaatacattaaacacatagccaaaatattagtataaattgtaagagatggttggtttggggtgtgtgttttgttgtttgtgttgtttaggtagcgtgagcgtcatgtgtgtcaatgtatggctcattatgtggcgagaatggttgagaggtggtggtttagtttgnagaaaaatataccaagacagaatacaaaagaantatatacgaacaatccgaagaagatagaggcaggcagatttgtgacaattacttattagtgngggccagagttggcctagtagttgtgtagccgtatgtggatttaggcgtgggtggaattcagcatatatatatatattacaaattattaactatatggggaggtgggtgtcctaaagagaaagcgaa

SEQ ID NO: 14095 - DNA, 488 bp, Glycine max
  Coding DNA Sequence Number=SeqID_4316
gaagaaagttacttctctccttgttaaaataaaacaaaataaacttatgatgcttaagtagctcagttaggatatcatgactaaaatattccaaattcaaactataaattaagccctcaaacctcccgaaacatcaaaatttaaggtttgaggagtacctaaagattgggagagataagaagtccatccagttcgagctagatgataagatattggagggaatgtaaataagggtgagaatatactgttgaaaagatactaatttgcagaacataaagtatactacctcatttgataccagttttaccaaaggcaatggccatgcaatgaatgtgttaacgacatctctcacatacttaatttctgatgtcgctaatggaacttcagcttcaccatcaattgggacccgggtctacttacctgactcgaggactggcccggaacccaattccccctatagtgagtcaacattacaattcactgtgctg

SEQ ID NO: 14096 - DNA, 490 bp, Glycine max
  misc_feature (207)..(207): n is a, c, g, or t
  Coding DNA Sequence Number=SeqID_4317
gtccggtatgcttcgccgtaaacggagtacatactgcaatccgtctctcaccgccgacacactcttcgcgttctaattgagttggttggacgccagggcgggagcgacttatacacagcttgctactcatggataatcgcacgaagttatcgagatccgatgtctgtgacgacactgggagcgagatgacgtgtacacgcgcgtcgncagaagtcacacatagccgagtgcgattgacggcacataattatctcgtcgcctctgaaagatgcatacacccatgtcatggcatctaacagtcgacatgcatggtttctgacagtggagtaccacactcgattctaatccgacagacgacatgcagagccgccttatcgctacgtccagtcggcgagcccagcgtatctaccatgcgcgtatatactgcgcctctacaactcttgcatcatcaagataagcatacacactcgcgacgactacggcaggaagt

SEQ ID NO: 14097 - DNA, 505 bp, Glycine max
  Coding DNA Sequence Number=SeqID_4318
gcatgtttgcaggtggtgtcctactggctttctcttgtagttcttggcgttgaacggcgggactcccaatctcgcgatgagcagaacgtcttaatatgcttttttatctacactgtttgtgtagggttattataattgcttattggcccgaatgtagcatcaacaggagctatctgcttcggactcttgctgcgtgtagagagcgcttgtctgtgtggtcctcataacggcgcagctactctctgctgctcctgcactcgtgaacaaaataagcgatatactgtagctaaataacacgaggtatggctctgtcttcggtgtggaagcgtactctactctcaagaggtgggattcaaatccgaggcaattgaggcaagatggagggatttatagagcggattcaggctatcttctcggttgaggtgtgtttgtagtgtaatcgtctgcgtgggggtaacctgcaggcccgggggatccacatattggaaaagctggccgccgaccg

SEQ ID NO: 14098 - DNA, 537 bp, Glycine max
  misc_feature (53)..(53): n is a, c, g, or t
  misc_feature (66)..(66): n is a, c, g, or t
  misc_feature (426)..(426): n is a, c, g, or t
  misc_feature (429)..(429): n is a, c, g, or t
  misc_feature (443)..(443): n is a, c, g, or t
  Coding DNA Sequence Number=SeqID_4319
taacacactcatttattcgtatgtatctctactataattcaatattaataacnaccacacctcttntactatcttcattttatctatattctatctatctctcctatccacttcctcactatcaccatatacctctatttcattctctcctccctctgtctctatctatatttactctctctctctacctcttatatctcaactgataatcacccacacatatacatcatcatatctactccactccacctcctcggtacacctttctacactctcacctatctcatatactctctatactacttcctatatttttatactatattatcttcattcatcataaattaatatattattactatatttctcaatcaccctcaccactaccaactctacctctcttggccatccactatctacatcccnctnacactcatcctctnatcatacaccaatttctccgcactcgaactcactcacagactcctccttcgctctaccatcctacatctcacactattctatatattcaactaa

SEQ ID NO: 14099 - DNA, 599 bp, Glycine max
  misc_feature (26)..(26): n is a, c, g, or t
  misc_feature (51)..(51): n is a, c, g, or t
  misc_feature (55)..(55): n is a, c, g, or t
  misc_feature (60)..(60): n is a, c, g, or t
  misc_feature (79)..(79): n is a, c, g, or t
  misc_feature (82)..(82): n is a, c, g, or t
  misc_feature (85)..(85): n is a, c, g, or t
  misc_feature (110)..(110): n is a, c, g, or t
  misc_feature (119)..(119): n is a, c, g, or t
  misc_feature (122)..(122): n is a, c, g, or t
  misc_feature (131)..(131): n is a, c, g, or t
  misc_feature (156)..(156): n is a, c, g, or t
  misc_feature (162)..(162): n is a, c, g, or t
  misc_feature (213)..(213): n is a, c, g, or t
  misc_feature (216)..(216): n is a, c, g, or t
  misc_feature (229)..(229): n is a, c, g, or t
  misc_feature (242)..(242): n is a, c, g, or t
  misc_feature (256)..(256): n is a, c, g, or t
  misc_feature (286)..(286): n is a, c, g, or t
  misc_feature (288)..(288): n is a, c, g, or t
  misc_feature (292)..(292): n is a, c, g, or t
  misc_feature (294)..(294): n is a, c, g, or t
  misc_feature (296)..(296): n is a, c, g, or t
  misc_feature (310)..(310): n is a, c, g, or t
  misc_feature (312)..(312): n is a, c, g, or t
  misc_feature (317)..(317): n is a, c, g, or t
  misc_feature (319)..(319): n is a, c, g, or t
  misc_feature (339)..(339): n is a, c, g, or t
  misc_feature (350)..(350): n is a, c, g, or t
  misc_feature (355)..(355): n is a, c, g, or t
  misc_feature (367)..(369): n is a, c, g, or t
  misc_feature (390)..(390): n is a, c, g, or t
  misc_feature (392)..(392): n is a, c, g, or t
  misc_feature (396)..(396): n is a, c, g, or t
  misc_feature (399)..(399): n is a, c, g, or t
  misc_feature (418)..(418): n is a, c, g, or t
  misc_feature (434)..(434): n is a, c, g, or t
  misc_feature (447)..(447): n is a, c, g, or t
  misc_feature (452)..(452): n is a, c, g, or t
  misc_feature (464)..(464): n is a, c, g, or t
  misc_feature (471)..(471): n is a, c, g, or t
  misc_feature (566)..(566): n is a, c, g, or t
  Coding DNA Sequence Number=SeqID_4320
cgaatgatatgaggtatcgacctctncctgatctggagtatcatcgtactntgcnatatnactcatatctgatactacncanatngcagtgtctacatgtcgtcattagnctgactatnctncgagctgtnatggatgatatgagctataacgtgntcgtcntcgctggtagcgtagagtccgagctatcactgcgctctgtgctgactcgtncangcgtcagcgcacnaccgtatcatcgntgtactgatcgagncgctgtgataggtgtatggtctactcgcgncntgananancaggaatgagcgangncgtgncngtcgtcgactcagatacagncattacagtgntagtncagcatgcgtgnnntagtgcgaatgcagtgctgtngngagnaantgcatcgatcgcgttggcntgacccttcacagatnatgccgtagatgnagtantgagtagtatgnacgcacnggtatacgacgtgagcagtccagagcgtacgcagcgcgctgatctggactactcagtactcggacgcatcgtcgcacgcgtagtgatgacgatgntgctcgagcgcggtagtcatgcatgacggagca

SEQ ID NO: 14100 - DNA, 415 bp, Glycine max
  Coding DNA Sequence Number=SeqID_4321
tctttcaatcaaaccctagttcctcccgatcatcggtactaatcgaatcaccatggctaagaactccttcaagctctctaatcctcttgagataagaatggctgaatctactcgcatcagagagaaataccaagacagagttcccgtgattgtggagaaagctgaacagagcgatgttcctgacattgacaagaagaagtatcttgtaccagctgatctaaccgttggacaattcgtctacgttgtgaggaaaagaatcaagcttggagccgagaaagcaatctttgtctttgtcaagaacacgctacctccaactgcggcattgatgtctgcaatctatgaagaacacaaagacgaagatgggtttctctacatgacatacagtggagagaacacatttggatcagcatgctaa

SEQ ID NO: 14101 - DNA, 564 bp, Glycine max
  misc_feature (45)..(45): n is a, c, g, or t
  misc_feature (56)..(56): n is a, c, g, or t
  misc_feature (110)..(110): n is a, c, g, or t
  misc_feature (185)..(185): n is a, c, g, or t
  misc_feature (190)..(190): n is a, c, g, or t
  misc_feature (259)..(259): n is a, c, g, or t
  misc_feature (356)..(356): n is a, c, g, or t
  misc_feature (401)..(401): n is a, c, g, or t
  misc_feature (476)..(476): n is a, c, g, or t
  Coding DNA Sequence Number=SeqID_4322
ttcatctctatatcatgtcgggcgccgcactcgacacaaccaccnctccgctagtntgcacgttgaccactgcaaccactaacgaccgatacctgctgcgtaccgctcangcatatcgtcgctgcgtcacgcgcgatacacttcgccagatttcatatcgtctctaagactcgcgaactctgatncttcnatcacgtgatctcagatcatcaacagttacgcgacgcttgcgcgtctacagcgttgcgcaccatctccnactattcctcattatctctgtctgcctacatgcatgtcgacgtatgtcattatctatagcagtaatacgcgcgaaattacgctcactcctgattctntctctacgtactcacaccatgtcgttgacacgatgtgtcgcgctnctacgtctgtcgtcaccttccatatcatctgcgcacggacagtacgctgccggcgcattcatatacgctcttctnattttatcaaacgtactcgtatctatctgatccgtttacctctctcacagctcacgttccacgcgtctcgcaatcacgtgtgtcttaa

SEQ ID NO: 14102 - DNA, 441 bp, Glycine max
  misc_feature (115)..(115): n is a, c, g, or t
  misc_feature (144)..(144): n is a, c, g, or t
  misc_feature (150)..(150): n is a, c, g, or t
  misc_feature (200)..(200): n is a, c, g, or t
  misc_feature (316)..(316): n is a, c, g, or t
  Coding DNA Sequence Number=SeqID_4323
acccacactcgttgttgtgtcacaacatgtgtctgacctcccgtacgaccacctattattacgtgcacacagagtttgaccacatcctctacagtattttatatccacaagcganctcgccaagcacaggtttgtacgccaaangtattntatacaccgacactgatggcgtgacgaggtgctctgatcatgtggtgtcnacgcactacagtcgctcaccccacgcgtatgtttgttcctctatcgccacgcaccgttctttctctgcgctccctgcaccgtacgcaccgctgattgttacgcccacacaccgctntctgctataccacgacatctatgtatctcacgtacgatcgaaatggcatcgacacccggcgccactaatctgaccaaccacatatatgaaaccacgtccgacctgccgcaggatatacatattga

SEQ ID NO: 14103 - DNA, 582 bp, Glycine max
  misc_feature (441)..(441): n is a, c, g, or t
  Coding DNA Sequence Number=SeqID_4324
tttcgtagtcgcgtgtgtagtttgcgcacacacgtttgaaacatgctttctgtgacaatacgtgcgcacagaacaacaaggaggtgtgttatataatgcgtgtagatagatggaggaggcgttctgtgtcggtggatccaccgcgctactttattcagtcgaccgtgtacgtgttgagccggactatttgttctataaatataatgcgccgcgcggcgagagatataagcggcgcgagcggcggcggtacaagctggtgaatagaatgagtgcgctcgagctcgcgcgcgcgtgctaaatatataataataagaaacgcttgtaaaaaaaaactcgtgagcgcgcgcgtccccgttggcggtgcataatgaatatatacgctcgcggtgtgacgcggggagagcgcgagaagagacgcgcactatgagagagcgtctgcgntgtcgttcgccgcgaataatactcagggcgagactactaaaggcgcgcgcgcgcgcacgacaatatagatggtatacggcgtgctggccgcgggcgacgagacgcgtattatagtcgtatatatttgtgactctcgccgcg

SEQ ID NO: 14104 - DNA, 572 bp, Glycine max
  misc_feature (55)..(55): n is a, c, g, or t
  misc_feature (100)..(100): n is a, c, g, or t
  misc_feature (330)..(330): n is a, c, g, or t
  misc_feature (407)..(407): n is a, c, g, or t
  misc_feature (546)..(546): n is a, c, g, or t
  Coding DNA Sequence Number=SeqID_4325
atatttgtctgtgcaaccactctcgaatatgtgtgcatgaatgaagctgctgacntcatccacatatggaattatgactgccacctgactgctcatgatnacatctcgcatagctgcacctgaacggtgtctcgactacattctgcaggagctacggcgcacgagctactcgtcagtgatagcgcgcgtacttcgtcgcgagtcgcgattctctctgcagagctattcgcatagcgctgctaactctatacattacagtcactatctaataatataaactgatcacactgcaccgcctactcctcggcttacgcacattctcgtcatttnatgagtagagctcagatgacatatcctagaccgccgtagcggatcgcatctgtgagtcgctcgatgtggtggacttncatgttatgtatcttgcattatgattaatcagctcagcatgacactctctacgaactcattcgttctgtacctccgctcttagctctctactctcgtcctatctgattgctaggcgactcggtatgcgagatcgatatntctatcacaatgaggcgtgcggcgct

SEQ ID NO: 14105 - DNA, 469 bp, Glycine max
  Coding DNA Sequence Number=SeqID_4326
tggcgtgcatgttcggcagcttcagcctcgacaacaaggccatcaccttcacagaccccactgtcttcgagagcatcgcgcccgagtaccacctctccgctgttggcatcgacgccaacactggcatgatcgtgctggttgacagcaacaaggacttcgccctccgtgccgtgcttgtgcacaggagcgacttcaagatcaacggcgttcacttcggtgacgttctgacgatcgaggacggcgtggcggacaacatctacaccaacacgttcaagaacggcattctgcccttcattgactctgccaaggtgtcctccaacaaggcggtcgtcgcgtggtcggactacagcaacaacggcaggctcaccacggccatcatcaccgtggaccaggcggccaacctccactcctcgccgctctacgtcatcggccaggccctcgcgctgaagcagcttaacggctaccacgt

SEQ ID NO: 14106 - DNA, 465 bp, Glycine max
  Coding DNA Sequence Number=SeqID_4327
aaatttttattgatcctggccacggaggaacggattctggagctagtgctaatggacttttggagaaaaatataacacttcaaatcgcgcttttattgagagacattttgattagtgaatatgatggggtttctgtccgcttaagtcgttcaactgaccaatccgtcactttgtcccagcgtacgaatgctgcaaacagctggggagctgactatttcgtgtctattcatattaatgctggcgggggcacagggtttgaaagctatgtgtatccaggcgtttcagcaccgaccaccacgtatcgcaacgcccttcatgatgaaattgtccgctcggttgattttgctaaccgcggcaagaaaactgcgaacttccacgttcttcgagaaacttctatgtccgctattttaacagagaatggtttcattgatacggcagctgatgctaataagctccgcaacgcaa

SEQ ID NO: 14107 - DNA, 417 bp, Glycine max
  Coding DNA Sequence Number=SeqID_4328
ttctccctgctttcctaaatacaaacacacttattttttccattgttcatatctttcttcttcagagtctcccaatggctggtgttgaggttgagaaaacagttccaaacacagaagagaagacgacgacgaccgaggcaacaacgatcgagacgccgaaggaaaccgtccatgcagatgactcagccactgcggttgaagttgaaatcaaagaagatgaagaagaagcaccaaaggtagagaaagagactgaaaaaaccgagacagctccggttaaagaggagaaactggttgaaactccggcagctgtggaggagaaagatgttaagccagcggcagaagaggagaagactgttgaagtcaagacatcctaagatgcttgtctttctctctcacccatgagaggagaagactgtt

SEQ ID NO: 14108 - DNA, 384 bp, Glycine max
  misc_feature (135)..(135): n is a, c, g, or t
  Coding DNA Sequence Number=SeqID_4329
ttcctcacacaatccccacttcaagaagcatgctgagagtgatacttctggtcctgatgctgcaaaataaagctgaagaaatttgctcaaaggtttgctagaataattgaaaatttcaggaaagatcttgcaagncaaggcgggccccttgagagcctttcttccggcaaaattccgggaaaaggccctaaaaaaaatggggttcaaaaattttttaaaaaaaaaaaggggggaaaaaaggcaaccgccatccccttttggaaaggtggttctcttaaggggcgcctgaagagggggggacccccaaaaatttttgttaagggtttttttgggagaaaaattattttttgggggcccccaatggagagaggttttttcaagagg

SEQ ID NO: 14109 - DNA, 513 bp, Glycine max
  misc_feature (212)..(212): n is a, c, g, or t
  misc_feature (375)..(375): n is a, c, g, or t
  misc_feature (463)..(463): n is a, c, g, or t
  Coding DNA Sequence Number=SeqID_4330
tataccggatgtttgacgcagacaataagtacactactactactctctacagtcatcaccggccactacatgtacgtatctgacgcagtcgtgacgatgatgattgtgatatagttgatggataagaacgatacgacacacaatgctacgcacgcacgcccgtacactcgcgttgtaatcagtcgcatcaacgccgcttgtctcgccggccngcatctatcacatcaccctactactaatcagtcatccgtattctgtatctcgttctgcactctacatcgacatccttgtcgtcgatctggtacatcaggcacagacgagatagcgccacgacgcgagtgtgcgcagtcgctcgccatcacgcgcgcatatggntcgcgtcacgagcgacgctatcgccgccgagcttgcgtctcctcgcgcgtcaatcgagtagaactacgcatttgacgatcgcgtctcncgtattaacttactaccctcagcacttgttgtgtgtgtacgtctcggaga

SEQ ID NO: 14110 - DNA, 527 bp, Glycine max
  misc_feature (37)..(37): n is a, c, g, or t
  misc_feature (63)..(63): n is a, c, g, or t
  misc_feature (68)..(68): n is a, c, g, or t
  misc_feature (94)..(94): n is a, c, g, or t
  misc_feature (106)..(106): n is a, c, g, or t
  misc_feature (112)..(116): n is a, c, g, or t
  misc_feature (139)..(139): n is a, c, g, or t
  misc_feature (168)..(168): n is a, c, g, or t
  misc_feature (179)..(179): n is a, c, g, or t
  misc_feature (185)..(185): n is a, c, g, or t
  misc_feature (189)..(189): n is a, c, g, or t
  misc_feature (207)..(207): n is a, c, g, or t
  misc_feature (225)..(225): n is a, c, g, or t
  misc_feature (228)..(228): n is a, c, g, or t
  misc_feature (231)..(231): n is a, c, g, or t
  misc_feature (244)..(244): n is a, c, g, or t
  misc_feature (249)..(249): n is a, c, g, or t
  misc_feature (285)..(285): n is a, c, g, or t
  misc_feature (290)..(291): n is a, c, g, or t
  misc_feature (326)..(327): n is a, c, g, or t
  misc_feature (336)..(336): n is a, c, g, or t
  misc_feature (345)..(345): n is a, c, g, or t
  misc_feature (348)..(348): n is a, c, g, or t
  misc_feature (360)..(360): n is a, c, g, or t
  misc_feature (365)..(365): n is a, c, g, or t
  misc_feature (369)..(369): n is a, c, g, or t
  misc_feature (393)..(393): n is a, c, g, or t
  misc_feature (412)..(412): n is a, c, g, or t
  misc_feature (414)..(414): n is a, c, g, or t
  misc_feature (458)..(458): n is a, c, g, or t
  misc_feature (464)..(464): n is a, c, g, or t
  misc_feature (471)..(471): n is a, c, g, or t
  Coding DNA Sequence Number=SeqID_4331
tcacatcaagtagtggacgtgctgtcgagacgtgctncgtcgtgtgtctgtcgacgtcactcngtcgngatcgactgcgcagcgcactgtcctnctacgttcagcntgtcgnnnnntgtcgctgcgtacgatactcggncgaatgcgagtcgacgtaggcgagctacntaatctaaaantactcngggntgctgcagctacgagcgncagcaaatgggtgatctnatnatnatgatgagtagancgatngatagtgagtatctatcgactgacgcgtgacggtantaggnngtacgtggcatgatgcgtcgctgactagtgagtcnntcagctgcnatcagctcntcnaactcatgtcgnatatnggtncgccgtccttactactataaaagnacacagcagctaacgacancnctcgagaggatatattaatacgtagtgcacgtgtgtacggctgntacgcngcatgcnacctccacatcactagtctgcagcgtgacaaatgtttcacgctactgtgcgatggt

SEQ ID NO: 14111 - DNA, 465 bp, Glycine max
  misc_feature (153)..(153): n is a, c, g, or t
  misc_feature (199)..(199): n is a, c, g, or t
  misc_feature (212)..(212): n is a, c, g, or t
  Coding DNA Sequence Number=SeqID_4332
gtgatgtagcacactctagacctaacagatggcgcgaaacgcgttatgcacacagacacatataaatagcgcgcacggtgctgtagtcttctgcgactttatatacaacatgttacgtgatctcgctcgcgtcgatgcggacctcactgctgncctcattagtatcaatacccatacacacggcgatggtgtgttgttnaccgcatgataantaatagaatatctcttcgtccaacaatgatcacttcagatatttcggcggcgtcgcatgtattctattagcgcgcgtcggtcagatgatcgtctacgctgttcatgtatatatatgttcatgcgtgcgtccgcgcgtcaatgtggtagtaatgtatggaatgaggcgagatacgagctcgaaataattagactgtacgcgaacatgtaattatcatatgcgaatgcgcgcggtgtgtgatatgtgcgacttct

SEQ ID NO: 14112 - DNA, 401 bp, Glycine max
  Coding DNA Sequence Number=SeqID_4333
aagataatccgtctgcatattgcacaagctgaaaggaaggcggggaatgcatgctgggaggcgtattggctatatcatggaaataaccctgatggctccatgcctagagatccctgattgggggtagctcatgatgctggctacacctacttcatcgatacgggatccggcaagcatgtgccgagggctttattcgttgatctggaacctagggctattgatgaattaagaactggtccttacagactactcttgatccctgatctacttatttctagcaaggaatacgctgctaataacttcggaaggggacactacactgtcggaagagacatagacgaactatggcttgatcgtatgccatgaatatcagacaactgcacgggttagcaaggattctt

SEQ ID NO: 14113 - DNA, 370 bp, Glycine max
  misc_feature (336)..(336): n is a, c, g, or t
  Coding DNA Sequence Number=SeqID_4334
gtaaaatcctaatgagcgcgctccgatttgggttcaagcgcgccgatcgggtttggttcatgaatcaggacgacatgaaggattcgatccgcgagaacgcgatcaagccagaaaaggccgtcttcatccgatcgtgtggggtcgattcgtccgagttttcgcccgacgccgtgcccgacgaagcgttggcggccttgcgcgccgagttcggcgcgaccggagacacccggttcgttgtctgcgttggccggatgacgtggcaaaagggcgtgcgtgagtttgtcgaagcttccaagatcgtcggcaagaccgtgcccggggccctgttcttgcttntgggtgaaatccaaaaagacagcccggacgttgt

SEQ ID NO: 14114 - DNA, 103 bp, Glycine max
  Coding DNA Sequence Number=SeqID_4335
gagtcaggttgatttgacataagatagattcgaaggatgttgactgcacacctgatagggacgttagtctcatggcgaatgagttaattctgtatttcttcaa

SEQ ID NO: 14115 - DNA, 241 bp, Glycine max
  Coding DNA Sequence Number=SeqID_4336
ttgaaggtgcttaatgtcttacggaggaactaaaaggggtgactgaacctgatcggaagatggagcgtactgacaagggaaggctgctcaagctacgtacccttggaaatatccgtccaattggtgagctatagaagcagaagatgggtcctgaaaagattgaccattacattgatcacgagctcgtaggattcccatacagcaaatcttgcccaggcgacgaaaatgacgaagccatatg

SEQ ID NO: 14116 - DNA, 464 bp, Glycine max
  Coding DNA Sequence Number=SeqID_4337
taatttttccgacggtagagcaatcggagttgcttccttctcgtactatagctcattaatgctgtctcagggatgcttagtccaccactctacggagcaatggtacattcaaacctccaatatacttttttcaaatggtacacatgttccttcgcgccatgcctccaaacaatctccatcaattcatatgccttactacaacgttaattgttaaaattgtgcccactgttctgattgtggaggatgtcttcaatttcatttttccattgaaggtaatgagaaaaacttgcacctctcctgatgcagttcacaaagtaaggcaaaagatttcagaacatatggacttgtggttatctgaatgcgtcgaaggcagaagttttatatgatcactattattttaacctcgcacgatgtgaatgatgtaataatttactataacttatttcatccttcataagcattat

SEQ ID NO: 14117 - DNA, 558 bp, Glycine max
  misc_feature (39)..(39): n is a, c, g, or t
  misc_feature (72)..(72): n is a, c, g, or t
  misc_feature (398)..(398): n is a, c, g, or t
  misc_feature (430)..(430): n is a, c, g, or t
  misc_feature (439)..(439): n is a, c, g, or t
  misc_feature (461)..(461): n is a, c, g, or t
  misc_feature (496)..(497): n is a, c, g, or t
  misc_feature (499)..(499): n is a, c, g, or t
  misc_feature (517)..(517): n is a, c, g, or t
  Coding DNA Sequence Number=SeqID_4338
tagcatatattgcagtcgctcgctctcttgtactcgatntcttgtgctgtctcaacctattgtagtgtgcangctgtagagttgaagatgtgtctatagacggcactctcacacgctgcagatatatacatgtaacaatttatagatatatcattatattcttctctgaagcgtgtcgtgggggtgtctgtgcagtgtcgtcgatagttatatcaactctttctcaataactaggatcagtagacagagggacgtgagtcagtgatagagagttgtatgattaataacatatataattataatgactgactatattacacactcctcttgatcaagtagtctgagtcgaggtgcatgtagtagcagggctcaatgtataggtgtgagcgagacataantagtgcgatgctagtgatatggtacgtggagngctgctatntacgcagggtcgaggcggctgnggggggggagagcggtggtgtaggggggggtgttnntnattcgtgttataatctcntcatctatgttgttgattacattaccttctaggcgtgcctg

SEQ ID NO: 14118 - DNA, 491 bp, Glycine max
  Coding DNA Sequence Number=SeqID_4339
atagaggaacgagcccaatcccgattcctactccgagacaggtgtacggcgggagcgggaggaagcgccggcgatggcgaccccggcgaaggaggaggcggcggcagggcagagagacgagctcgccgactcgctgtccgagctcttcaccaacgtctccctcatggtccgcggcgagctccagggaaccaacaaccagctctcgctgcttgaaaagatgaaccaacgcgtgacagaggagtacagtaaccacggagatgttgcatccggtctgcgggtctttgtagaacagctgaacgagaaaaaccaacggtttgacgagtacacaacgcagatcgacgcgatagaccagcaggtgagtgagtttgaggcagtggtgtccatgcttgataagcatgtctccctcttggagaagaaagtgaagtccgcatatcacattgctcccacacaatgattcgtctcccaagcatgttgtatatcatccctatcat

SEQ ID NO: 14119 - DNA, 356 bp, Glycine max
  Coding DNA Sequence Number=SeqID_4340
gtccttattcaaacacactttccacatcctcggcaaccctctggcgaataccccatcgcgctttcctaatccttacctttattctgtcttgccacaaaaggcccacaaacgaaatcccccaccatgacaaaaagccaataaagccgaacaaacgaggacgacaccacccagtggggcagcaaaggatcccacacccggacgcaggggggcagcaaaggaccaggcaggaggacgcaggggtgagaaatcagaaaaaaaaaactcggacgaagcaagcaagagacaactaattaataaaaaaaagaaacaaaaacggaagaaccaagaccaggcggcagcacgaggaaactaattaa

SEQ ID NO: 14120 - DNA, 528 bp, Glycine max
  misc_feature (402)..(402): n is a, c, g, or t
  misc_feature (503)..(503): n is a, c, g, or t
  Coding DNA Sequence Number=SeqID_4341
gatataatagcctacacgactctttatatggatatagatccgcaggtgagaaagacaatagaatatagcacaagacgtaatttataatagtgatgaaaaccccgacacgagtgatgaaatagtgataccagaaacataggcaaaaaaatcaaacgggaaagtcacagtacagacgacgcaacgatgttgtaacaaccccctgacctctcgcctagttcgcgccaccggcgccgccctgctgttagttgtttgcctcactctcgtttctccctcctcgttttatttgatatatttttgtcttaagacgatagacgaagataattagagtacatagatatttacatcacccctcgcccgattgtcgagccgagaaccacacgggggttagccttgttatattangttttcatccaatatatattgctgatattagtattttatgagcaccgcaaatacgctgggggatagggtatcacgttcgctgtctggtcgtggtgctggtntgctctctttgtgtttacttgatat

SEQ ID NO: 14121 - DNA, 578 bp, Glycine max
  Coding DNA Sequence Number=SeqID_4342
ggatcaatctcaacactggacttcaactcagaccccgacaagaccatcagaccaacaccatggtaccatgctgagaaggtctgttgggtacgaatcaacgcagcccctccacccgtgaatgcggaacaccgagtggcagggtctaaccctgaaactgggatagtgaacaaggggtggagaccagaaggtacaccaggggcaggggcgaccttgaggaagtatgtggctgcacgcacttgcacatggagattccatgaacagtacccttgcaccaaactgttgtagacaaggctgatgctacccacactgtcatcaacctttcataccatgaatgggctgaccctcaacaagagcgcacgcctcgacattatctttcatccactacagcatgcattgctagaggaggcatctcggatcgccaaagcacaggcagcagacattggcaaccgatacacagagccagtgattctgtacaccaaaaacacccaacagggaacgaaggagatgccataacgcgagagctcggatattaccggccaaagtcaacgggaagtcaatgcgtcgggtgggcaatgcac

SEQ ID NO: 14122 - DNA, 552 bp, Glycine max
  misc_feature (162)..(162): n is a, c, g, or t
  misc_feature (207)..(207): n is a, c, g, or t
  misc_feature (408)..(408): n is a, c, g, or t
  misc_feature (486)..(486): n is a, c, g, or t
  misc_feature (523)..(523): n is a, c, g, or t
  Coding DNA Sequence Number=SeqID_4343
gagtctcgtgagattcgtgcgtagaagcgagacacgccagcgcaccatggcaggataagagtgtggtggcgggtgaatcggccgatatagagacactagcagagctataatcacgcatatagtacaggaaagacgatctgaggagaaggatggcaacctcanatataaggacagagaagaggggcgacgcttgaacggagtatatcntagaggtgatataacagcaggagacaaccataggctggcacactagattacctacatgcgagagctatttgaaggtgtgtatgaggtgagaccctggtgaggcgttgaagcatgtctcagctataagtatacatacgttggtgtggaggcactacgagtccaccgcagttacacattatatcaacacactaatagaatganggcaatcacagggagagatcgcgcccctcacatgctctcatgccgtttagcagttggtggcatttatgaggtgggtgntgagttattatgattgcttgtacttctatatgtgtangcagtgggtctctctgtcgtcggataaga

SEQ ID NO: 14123 - DNA, 541 bp, Glycine max
  misc_feature (46)..(46): n is a, c, g, or t
  misc_feature (94)..(94): n is a, c, g, or t
  misc_feature (115)..(115): n is a, c, g, or t
  misc_feature (129)..(129): n is a, c, g, or t
  misc_feature (174)..(174): n is a, c, g, or t
  misc_feature (188)..(188): n is a, c, g, or t
  misc_feature (211)..(211): n is a, c, g, or t
  misc_feature (216)..(216): n is a, c, g, or t
  misc_feature (219)..(219): n is a, c, g, or t
  misc_feature (223)..(223): n is a, c, g, or t
  misc_feature (242)..(242): n is a, c, g, or t
  misc_feature (293)..(293): n is a, c, g, or t
  misc_feature (319)..(319): n is a, c, g, or t
  misc_feature (322)..(322): n is a, c, g, or t
  misc_feature (449)..(449): n is a, c, g, or t
  misc_feature (451)..(451): n is a, c, g, or t
  misc_feature (478)..(478): n is a, c, g, or t
  Coding DNA Sequence Number=SeqID_4344
agcgctttgcatcaactactcgtagatataatcggactcgcaagangaagcgcgacatacgcatctggacagtgtattctcatctcgtcatcgngtctgatcgtgtgtgatgacntcgatcatacttantccgtctactcttacacttgtgagtgtcagttcgcgcgcagcgancgtctctacgatgngatgtctgacgatgtagtatatntgatnagnaganatgagagtcgaatccacgncatgctatcgcacagcgacagtgccagatatatcaccgatcagacgtgctnacataactgctgactcgctgctatcnacnatcaccgatacatcgtgcagctcgagtcactcaaaccgacagcgatcgcagctcacgatgatcgtactcagtcgatgtctcatagctataaactatctcatcttagatgagtgcatgcgatagacgncntacgcatcagcgtcatcgctatatcgntcgggactgtcacttatcctagcagtacactggacgagcgtgttcgagcggatcgctgattac

SEQ ID NO: 14124 - DNA, 527 bp, Glycine max
  misc_feature (85)..(85): n is a, c, g, or t
  misc_feature (140)..(140): n is a, c, g, or t
  misc_feature (175)..(175): n is a, c, g, or t
  misc_feature (277)..(277): n is a, c, g, or t
  misc_feature (339)..(339): n is a, c, g, or t
  misc_feature (357)..(357): n is a, c, g, or t
  Coding DNA Sequence Number=SeqID_4345
gatatgtacaccacttgcaactaggaaggagaatacgtggagcaagaggcgtattcgttagtgcatagactagttatatcatggngcagtagtagcgtgacgtagctcatatatagcagtgtctgaattggacaggcatnggatgatgacgacaatatccactagctctagaatngaaactttgatactcttcagtggaagagcgggctagcataatcttcacgcacagcagcagcactctataggagtacaggtagaagctacgtagcatataganctcgtcggcagaatatagaggcatcaaataatgtgataaagacaggaaaatatagtgtaggntggtactcgtaacagaangcgtagaatgtaagacgacacacgtagcgtggcagtacccgctcttcgggctgcgcctactcgcggagagagtatatcctctacactctatgtatatcctaaagttaatgcctggcgccccggccctaaacgggtggtgtgatgcgagcaccttgcactatattatttat

SEQ ID NO: 14125 - DNA, 491 bp, Glycine max
  Coding DNA Sequence Number=SeqID_4346
tgctcctcttcaaagaactcctagagcacttgacgcagttagtcccaaagttggtattggaaagagaagccacgacatcaccagaccaacaattgagactgagcctaataagattcccacagggattattagaccaaacactccaaaaaagaacggcttctatagtgattatcttcaagattacaatcccaatcccaagaccatgagtttcaagtctccaactgctggagctttgaagagagagataacagacagaacttcaaggagttactcaagcacttctttcatcaatcctatggtcagtggaagaacttcaaatagacagcctgaaaagggaagaaatagcacttttggtacttatgagacgggcagaacatcaactagaccagaccccattgagccacaaagacgtgaagcatcagctgtgagaaatgctcaagttaatgatattaaaattcctgttgaaacagctcctgatcaaaactttgcaa

SEQ ID NO: 14126 - DNA, 497 bp, Glycine max
  misc_feature (116)..(116): n is a, c, g, or t
  misc_feature (310)..(310): n is a, c, g, or t
  misc_feature (367)..(367): n is a, c, g, or t
  Coding DNA Sequence Number=SeqID_4347
ctatgtctcactattgtgttatgttatcttaaatgtgtctataatatgtaggtgtttagtcttccaccatacataatatatttacatttatttctatataggtataggacgtatcnatgcatatatcataaaatggcataattatcatcacattatgattcagtatagcattactatcacaccacacatctcacgcgtatgcgtctgcttgcgtgtgtgtgtcgttggtactcattcacaaatttattattaaataatccgatattatatgataccgtatcgttttcttcactataatatatttctcatntttatccgcctctctcacgtagtcggcacagcgcctcttgtctcttgttctacgatnagcttcttatgatttgaagtagattatgtgcgacgcatgagtggtggtatatcagctggtgttcgggctgcgtggtgtggtattgagtgtatgtagagaggagtggtgtgcggcgcactgagagccaaga

SEQ ID NO: 14127 - DNA, 577 bp, Glycine max
  misc_feature (58)..(58): n is a, c, g, or t
  misc_feature (60)..(60): n is a, c, g, or t
  misc_feature (504)..(504): n is a, c, g, or t
  Coding DNA Sequence Number=SeqID_4348
tgatttcgatgcgtgctgcgagcgagcatgataatatgtatacacaaacaggcgacgncnatagaaagcgtatcaggtgaggtgcgtccctgttgagtcctgagcgtatcagtaccgccgtcaattattcgcacgtctgtcgatcttgcgtctacgctatcaccatcgtgtgtgcagcagtagacgggcgcacatactcgcattaagaagcggaacgtcactcgtatacaatcgtggtgctgatcgcccacgttgtcgcttaagctcgctgtgtgctacgtccgctcttgttgttgtcaccccttcgcttttacgatagaggcgcgatgctatatcgcggacaggcacgattctaaaactctatcatattatcagcgcgtggagcgctgttaggggtgcggcgtcggataatatacgacatattgcactctggcagtgcgactcataatgttatttctttatcgtatagctatgggtaagataacggttataacggtgcggtcntcttccgtgtcagccgcggtcggtactggtgggtgggccgtgtggccaaaacagtgtattcttggcagtgcct

SEQ ID NO: 14128 - DNA, 549 bp, Glycine max
  misc_feature (56)..(56): n is a, c, g, or t
  Coding DNA Sequence Number=SeqID_4349
gggagaccgcctatagttacacacccgcctctccgcacggagtggaccaaacgacnagacagcaaaacaagaagaagtctataataaagagagtcgaccgcgatatgtgttatatccaagaccaacacaaataaacatcgcacaaacaccacaatgagagtagcgcaggcggcgcggattagtatcagatcgtctacacgaagagaggtaaagaaaacaagacatgcagcactgaattgtcgccccgaagttagaccccccctttgttggtctcacccacatggaggttatatgttaagttcaggagaggaagaagttaaacaagaggaacatagatgatatagaagaaagagaaaaaacgaaaatatcagtgcgaaagttgttatatctatttcccaccacaccacccaagtggcgcccattgttaggagaggacagcagcaataggaggtaggcgagatgtgggggtgggttggcggtgcgtgctctggtctgcagtaagagagagagatgtgcggtgttggtcgccgcccgtgcttttattaggaa

SEQ ID NO: 14129 - DNA, 181 bp, Glycine max
  Coding DNA Sequence Number=SeqID_4350
atgttggtttatgcgctcacgaagcagggaaaagaccctcctacggttttggaggctaaagaatttaacccttcttttcttggtttccaggataaaactttggttcctgttgaatttgctttgtgtttttagtttaagttttgtttatttttcagacaatctcttgttttgcgtaaaaaat

SEQ ID NO: 14130 - DNA, 544 bp, Glycine max
  misc_feature (46)..(46): n is a, c, g, or t
  misc_feature (168)..(168): n is a, c, g, or t
  misc_feature (190)..(190): n is a, c, g, or t
  misc_feature (382)..(382): n is a, c, g, or t
  misc_feature (408)..(408): n is a, c, g, or t
  misc_feature (457)..(457): n is a, c, g, or t
  Coding DNA Sequence Number=SeqID_4351
gcgtgtacgcgtcctatctattatacatactacaatctgtcactanacgcgcgcacccaggccacacgaccgagacatcagcgactgtcgtgtcatcgttctatcaacactcgtcatgatctctatacacatcatgatactaatgtggtgtatgcggcctgtcacatnactctctcctctctcctactcnttacatcctcagtctacacgcacccgcatgtgcgtgttatatatatctaaatcatatatacacatacattgcgttgtctactacacacgtactatatacgatctgtatctactctctctctctcactatctgcgcgttctgtgtgactcttgcggtgcacatcacaacaacatcatctcttgctctatatcntaatactgtgctgcttgtctgtgctnttgtgtcacttcctctcactgtctgtgtcgtgtgcctgcgtgcttgtcntgctcgtcatcacacgatgcgcatgctgtggcgtcgcgagcccgtcagtagatgaacaacacaacctcgtcgagtgctatcgtgact

SEQ ID NO: 14131 - DNA, 555 bp, Glycine max
  misc_feature (224)..(224): n is a, c, g, or t
  misc_feature (242)..(242): n is a, c, g, or t
  misc_feature (296)..(296): n is a, c, g, or t
  misc_feature (312)..(312): n is a, c, g, or t
  misc_feature (316)..(316): n is a, c, g, or t
  misc_feature (319)..(319): n is a, c, g, or t
  misc_feature (337)..(337): n is a, c, g, or t
  misc_feature (342)..(342): n is a, c, g, or t
  misc_feature (358)..(358): n is a, c, g, or t
  misc_feature (374)..(374): n is a, c, g, or t
  misc_feature (390)..(390): n is a, c, g, or t
  misc_feature (400)..(400): n is a, c, g, or t
  misc_feature (402)..(402): n is a, c, g, or t
  misc_feature (417)..(417): n is a, c, g, or t
  misc_feature (426)..(426): n is a, c, g, or t
  misc_feature (430)..(431): n is a, c, g, or t
  misc_feature (438)..(439): n is a, c, g, or t
  misc_feature (449)..(449): n is a, c, g, or t
  misc_feature (451)..(451): n is a, c, g, or t
  misc_feature (459)..(459): n is a, c, g, or t
  misc_feature (462)..(462): n is a, c, g, or t
  misc_feature (464)..(465): n is a, c, g, or t
  misc_feature (472)..(475): n is a, c, g, or t
  misc_feature (497)..(497): n is a, c, g, or t
  misc_feature (500)..(500): n is a, c, g, or t
  misc_feature (505)..(505): n is a, c, g, or t
  misc_feature (513)..(513): n is a, c, g, or t
  misc_feature (519)..(521): n is a, c, g, or t
  misc_feature (525)..(525): n is a, c, g, or t
  Coding DNA Sequence Number=SeqID_4352
tacttatcttcttcaccacgttcggcctttcttttttcacctccttcccaatccaatccaatccgaggcagtgttctctctaccagcatgcggtttttccagagcgtgaggtgagggagtcgtggaggttaccgttgtgcatgagatgatagacgagaaggaaacggcgtcgtttggggtcgaacctaaagggaggccgagtccatgagcttgacggcgacggnatcgccggccgtcgtggngcggcggcggagggggtcgttcgttcacgcttgcggagtagtgtgcgcgtgtcnaaaaacgagaagagancggncanctggttgtaaagagaggnaggtnacccggccaacaccanaaccaccaccgctctnctccttacctcccggnagaccatggncngcccaccgaactccntcccgctgncttnngtcaccnncaggctttcncngcaggganacngnntatcccnnnnttgatgcctccctccgcccgancgnttctnccttcggnccctcnnncaanctgcttccacttttcttattggcaaaccgc

SEQ ID NO: 14132 - DNA, 285 bp, Glycine max
  Coding DNA Sequence Number=SeqID_4353
ttttgccaatccatgaatgggaaagggaaatattggacccctttaaaatttttgtaaaaattccccgctaaatttttttgaaaaacccccccccttttttttactgccaaaggccgaaattccatgttcttcccacactcggtatacccgctcacaacgcccaccaaatcttcccccaatcttaactcccccaccacaccaaacactgcgcgatactactaattgctactttaaccctagatcacagaccgatgcaattacttcatccattttcacagaaactgg

SEQ ID NO: 14133 - DNA, 594 bp, Glycine max
  misc_feature (36)..(36): n is a, c, g, or t
  misc_feature (58)..(58): n is a, c, g, or t
  misc_feature (65)..(65): n is a, c, g, or t
  misc_feature (121)..(121): n is a, c, g, or t
  misc_feature (131)..(131): n is a, c, g, or t
  misc_feature (196)..(196): n is a, c, g, or t
  misc_feature (308)..(309): n is a, c, g, or t
  misc_feature (321)..(321): n is a, c, g, or t
  misc_feature (392)..(392): n is a, c, g, or t
  misc_feature (403)..(403): n is a, c, g, or t
  misc_feature (418)..(418): n is a, c, g, or t
  misc_feature (450)..(450): n is a, c, g, or t
  misc_feature (465)..(465): n is a, c, g, or t
  misc_feature (481)..(481): n is a, c, g, or t
  misc_feature (517)..(517): n is a, c, g, or t
  Coding DNA Sequence Number=SeqID_4354
gcgcggccttactgcgttctgagtacgcactctcantacacgcagtcatagttgtcanccacganacgttagtgcacacacactagctctctgtcgtcaagatctgcgtatacgctatgancgatacatcnctcagcgaacgacagtagatcatacatcctatctacccagatccacacacatcacacagtctctnatgtacccacgctctacacagtctacacgaaagcactagcccgtaccaatttttcacacataaagagatctatatatttgctgttactcactctgctaagtagaagtaaaanntatctctctctngtgctatgttgtcatggggtatcacgaggaaatgagatcattttaataggctgtgcatcacacgccaaccncgtgtgaactngcgtctatcatctgncgacgcgacgtgaccgcgcgcatcactactcnttctcttcttctcgntattatccctatattntaatatacatcaagatatcatctaaaaactacgagnaatgattgttaatatctctccgtcgccctacatcttatactgtttcaacatataatcgcacgtctttcattaccata

SEQ ID NO: 14134 - DNA, 393 bp, Glycine max
  Coding DNA Sequence Number=SeqID_4355
gaatctctttgacaatcgacttagaagcttccatgaacaacgctcgagatctcgcagtcgtctctacttctgcaattgtcggtgctttgatttcagctcttgcgtttcgcttcttctcatcaaaccctaagccccgaagatctgcttccaccgaaatctccgcagtttccagaagattccctggtctcgatccttacagccctttgaagcgaaatgggtacttatcatgggatgattatttcatggcgattgcattcctttcagctgaaagatcaaaggatcctaacagacaggtcggtgcgtgtttggtgagccaaaatggtgtgattctcggaattggctataatggctttccaagaggttgctcggatgacagacttccatgggccaaga

SEQ ID NO: 14135 - DNA, 545 bp, Glycine max
  misc_feature (432)..(432): n is a, c, g, or t
  misc_feature (452)..(452): n is a, c, g, or t
  misc_feature (511)..(511): n is a, c, g, or t
  Coding DNA Sequence Number=SeqID_4356
atacatacgatactcctggcctcgaccatgccctgagtatagatcatgtgatatggcgtggcatgtgtcggtgctcactactgcgtgtatactgagcctcgcgctgctgcctggtgcgatccgcgtactggagcacttgcgaatagtatggcataatgcatagcaaacaaccgcgttatgtccttgagtgtcgctcagtactatggtgctatcatatgtggttcacaactacccgtcatcaggaactcgagacgagtgagtgtagcgagcgccacggcgagcgcgtcgacacacaccacgagattgatgcacgtgttatcgctttggtacatcgtcctgcgcatctcagcacgaccagcggccggtgtacgggactcgcgcctgcggcatgtgcggctgtgcgcgcgtggcgcggggtattggcgacgtcgncacgagacgcagtcctaggncgtcagccgtgtgtctctgctctcttcactggcgttctctccgtgtcatgtggctgcgncgcgtacgcgtagtctcgcatcactcgctgttac

SEQ ID NO: 14136 - DNA, 213 bp, Glycine max
  Coding DNA Sequence Number=SeqID_4357
atagtgtatccccacgggcatggcaggtaccgcgggtggacttcttttctctctcaaccctgccacactactgagattactacaacgcaggcagcagaccacaccgtacggatgattcctgccatccccaagggttacaccacgcgaccggaatgcttaccgggaaaggacgacgtaccactccgccccagggtaccctcacacagggaggat

SEQ ID NO: 14137 - DNA, 429 bp, Glycine max
  Coding DNA Sequence Number=SeqID_4358
ggaacgcatggtccatcgacctcatcctgggcggcgcggggatagagaaaaaaattggtggcgccgttgagcgatttttggcggagattgtgtggggaggagcattggccggcggtcgcgggcggcgaggtagcaggcgttcagagcgcttcgcggctaggtgttcctcggcctggacctcgccggacgggggctatattttttctgcctctttcccatcttctggtcattaatctttctctctttttctttgatttcacctctgcgagatggtggcgctgtaacctcaaaggcatcggcggcgtgctacactgtgtggatgaggtccagcaaggtgttccaaggcatgttggcttgttcgtctacgacgtcgcggacgagctggcgttccgggtcgacaaccctcatggacgtccacagtgctctgct

SEQ ID NO: 14138 - DNA, 572 bp, Glycine max
  misc_feature (65)..(65): n is a, c, g, or t
  misc_feature (72)..(72): n is a, c, g, or t
  Coding DNA Sequence Number=SeqID_4359
ggaacaaaagtggagctccccgcggtgcggccgctctagaactagtggatcccccgggctgcagnaagcccnttcataccacacttatcagagtgccttacccggagcttttgcctctggcccttcaccggagcttttctccgaaattggaattttgtagcataaaggaatgattaagtacaccatgatgtcacccttgtaccgtcttccagccttcttcggagggtgaagttgacgacatttataattgtagagtcatctgcattcctagctcagagacatacctgctgaaaaagcacttcctgttactcgaatgttgcaaacgctgaatcggactttttggtttgaatctattggtttgggtcttgagctctgttttcgaacccacgcctctcagtgatcatgataacgacgagatgaaaggacgcgcccaggtatatgtatgaaacgtagaccctagtaaatgggttagcgagggtagtcaactcgaactcacctatcaggaacccatttataccgtcgagccctcggcatacagcagatttatgataacagccactatatctcgtgtg

SEQ ID NO: 14139 - DNA, 560 bp, Glycine max
  misc_feature (26)..(26): n is a, c, g, or t
  misc_feature (353)..(353): n is a, c, g, or t
  misc_feature (386)..(386): n is a, c, g, or t
  misc_feature (400)..(400): n is a, c, g, or t
  misc_feature (480)..(480): n is a, c, g, or t
  misc_feature (527)..(527): n is a, c, g, or t
  misc_feature (535)..(535): n is a, c, g, or t
  Coding DNA Sequence Number=SeqID_4360
caagcgcactagcatatcacgtctgnctaccttgtactctattgtgtgcgtgtacaaccagtgttgtcggtacataggcgagcgcactatggtgacgctcgcttatggttagttatattgacgcgtgcgcaccctcatcacgctcgtccctctctcttctctcgtgcggtgtcgtctagagcgctggtctcacgcgtcgtctgtgctgtctgcgcttactagttgtatgtattgacatcatgtatattctatgtcatacacatatatatgagtgacatagattagtgtttaatagagacactcctgcttcacgtatctcacatcatcttgcatctcagtataataatataganatatcactgaggtgaggacagagcgaagtgtgngtgttatgttgttntactcgtctcatcagtgacatactgtcgagacaacacgacgcagacacaattgattattacgtcttccctttatttagtncctctcaccgcgaagtacacatcaaaagtacataatatatgtaatanttatattnttcactacatccctacttctattat

SEQ ID NO: 14140 - DNA, 398 bp, Glycine max
  Coding DNA Sequence Number=SeqID_4361
ttccttagcccgcaagcagagtatgcattccttccttgtccctcgccgacgcatccaccgccaagcaacctcgctacatatgcgccgttccttcgtctacccccattgttctaccaaactcgtcggccggtgagcccatacatacacacgcacaggtcggatcagaggtcggagctcgtgcacagtttgatagctgcagcctggaggctggtggcgagaggatcatcggtagccatgaacgggggcatcgggggcacggcggagggggcgcctcgcccgagcacggactggggcccgatcatcgtggcggtgatcctgttcgtggtgctgtcgccggggctgctgttccagctgccggccaggacccgggtggtggagctcggcaacatggccaccag

SEQ ID NO: 14141 - DNA, 131 bp, Glycine max
  Coding DNA Sequence Number=SeqID_4362
aacataaatctaagggtgaatggatgtaaggttctgcagcttaacttgtacactctctttgtgtcattatgtttttgaaacaggtaatttcaggttcactgtatgacattcacttgtctgttttatgtttc

SEQ ID NO: 14142 - DNA, 393 bp, Glycine max
  Coding DNA Sequence Number=SeqID_4363
tgcgtctctctcttctcgaagaaagctcgcccccacagctccacaatgatcatgtcagaggagaaccgcagagaaatctgcaagtaccttttcaaagaaggagttttgtttgcgaagaaagacttcaacctcgcgaagcaccctttgattgagtcagtaccgaacctgcaagtcatcaagctgatgcaatccttcaagtccaaggagtatgttagggagacgttcgcctggatgcattactattggtttctcaccaacgaagggattgagttcttgaggacttaccttaaccttccttctgatgttgttcccgctactttgaagaagtctgcgaagcccattggtcgtccctttggtggtggcccacctggcgatcgcccaagaggacctagg

SEQ ID NO: 14143 - DNA, 537 bp, Glycine max
  misc_feature (440)..(440): n is a, c, g, or t
  Coding DNA Sequence Number=SeqID_4364
aaggagctctttggacggaccgacatagcagcactgctggtgcgtcgttacttagcagaactacggcgtggacttcttgacctgtcgactactcgacgtgttaatagggtattctcgctgtcgggtcgtaatggttcactatttcatagtgcgattatacgtttgtccattcggtgatgcaaggatgttcacgttgtgtgttctatttttcagtgcctatacggtctctcaggacctttttcacgttgtactggttacagctgtccatcgtctctttctacgctacaccgcgatgccgcagatccgaaatgagtcgttgtacatcccttatacttcatactggcactgccacctatttccattatccctgtgggggaaacaacatggcctgtagggcttccaatactttaggtttgatggtgtaccctccgtctgtttgngttgctctggtatcggagaaaaaaactccttctactcctgtttcgcttttttttgtgaaaatgggtggctatgcgcgccctcgaatgttaattttat

SEQ ID NO: 14144 - DNA, 554 bp, Glycine max
  misc_feature (152)..(152): n is a, c, g, or t
  misc_feature (327)..(327): n is a, c, g, or t
  misc_feature (499)..(499): n is a, c, g, or t
  Coding DNA Sequence Number=SeqID_4365
aaaaacacatcgtctacctactagctacatataatgcctggtcgcgcaaactctcgcccatatacacctactcacgaatttcacgcgtgataagcgttctgcacgactctctatatagaacctcttgattgttctcttccccagtcttgccnctatctacaactctcatctcttatgacacaccaccgcatccgcatataatgcacactatacacggcgggtgggagagcacgacattgatcacacgatcactttttgttcgccactaacttctacacagttatccgcgcgacctgtccttatatgatgtgcgcgtgcattgtcatnctctgcagctactctatattatatctctccgcgcgcgttgcctgtaatctgtaatgttagtaatgcgcgtacagcgcgccttctatatatcatcattatataacactcgtcagttgtcaatcctgttggacttcactcgacgcgccatattatgcttctatactctataatntgtatagtgtcgctattgtgcgagactcgccctcggactcatcttgtgtctgaaa

SEQ ID NO: 14145 - DNA, 573 bp, Glycine max
  Coding DNA Sequence Number=SeqID_4366
aaattgatctcttgcacacaccactcaacagagctagcagctagctatagcggagccgaacagagtgcagcagagtactagagtgtgtttctcggcatgtcgacaaggctggccgcggtggtgcggtggtgcggcggcgcgcggactgagcggccgaggctgcgacgacggcgcagcggcaggacggtgcagctcggcgggcggcgcaggaacggcagccgcgggtgcaggctggccgtatcgcggctggtgcggtggcggctggtggccgagctgctgcggcccatcaggaaggcgctgcttgagatggcggccgggcggcggcacccggtggccctgccgctggtcagcttcccgttcgtcggcgcgctctcgctcccaggcaccgtcgcttgacgcgagacgggcgtccggcgagagcgcgagaaggcgattcacttcacgtgtggtgtaacgaatccgttgggagttaaccacgacgtggagtgagcccttgtccgctacaggcttgggtacaaatcaccgagtaggatacgtattggctagtttagctcctcttgtaaaccccgtgta

SEQ ID NO: 14146 - DNA, 571 bp, Glycine max
  misc_feature (70)..(70): n is a, c, g, or t
  misc_feature (120)..(120): n is a, c, g, or t
  misc_feature (205)..(205): n is a, c, g, or t
  misc_feature (219)..(219): n is a, c, g, or t
  misc_feature (239)..(239): n is a, c, g, or t
  misc_feature (324)..(324): n is a, c, g, or t
  misc_feature (326)..(326): n is a, c, g, or t
  misc_feature (354)..(354): n is a, c, g, or t
  misc_feature (376)..(376): n is a, c, g, or t
  misc_feature (451)..(451): n is a, c, g, or t
  misc_feature (468)..(468): n is a, c, g, or t
  misc_feature (542)..(542): n is a, c, g, or t
  misc_feature (545)..(545): n is a, c, g, or t
  Coding DNA Sequence Number=SeqID_4367
tacggacgatcacactggttacttcacatcctctggcgatgccaccgcgcgcgaccacacgcactcgcantctctctatgtgactcttacgcacaggctagtcatccaatagaggcatcncacttcactctacttcggtctacgactcacatcatacacatcataattatcgtcattgctgtctgctctactactaactgatacncacttataacgggngtgaattatatctctgaaanattgtgacatcctctcttacacatccgcgcaccccacgcggaatctgcacatattatatcttccgatgcacactccgacataacncncacactactgctacacagtacttccacntctcctcatcgcacacgcaccnttactatgcatgtatctatcacgcctctattagtagcgtcacagctcccgcggtgcatatctatgtatatcttanacggccattgctcatcntgtgagatacattagcacatctatctgtatcacaatgatctaggtatattttactaatatatacctctcatagnccncgattctctgagatcgtcatatctat

SEQ ID NO: 14147 - DNA, 510 bp, Glycine max
  Coding DNA Sequence Number=SeqID_4368
taacttacgattgcccattaaattcagtttagtgatatgttaggtttctcttaaaagtatgtttacagtttgcacattatatttggttgaaacctagtttcaattgaaaacaacaccaaagttgtttttacaaacgcactttgcaaaatgaaatctattcaaatttaagttttcaaactttaatccaaacatggaccatatcatcaacctgtgggatgagtagacagaaaaaaaaaaatctatttgtgggtgctcgccttttccctgaccgatttaacataaagattgatgtgattcaatttgtagcaagtttttgtcggatatgtaagttctagatttggtttcgtcttgataataattaaattttaaagttaactatgaattagttttttaatttcttttataaggttttagtgtttatctttatgtattatttaaaatgatatatatatatatatatcacacacacatgcatgcaaaaaaaggactagtcgggttactcatttttca

SEQ ID NO: 14148 - DNA, 515 bp, Glycine max
  Coding DNA Sequence Number=SeqID_4369
gttccgtatcctctagagaaccaattttgtgccaaacacaaagagagcttccgatcctgaatttgttcaagtcgttcacagaacaagaatcggtcggtcaaaatgatcatgacaaggagcaagactcaacagatgaaggaagacagacttagtggattgcctgatgaaattttgtttattattatgtctttcataatgataaaagatgctgttaaaacatgcatcctgtcaaagcggtggaggaatttgtggaaattcctccctaatcttaccttacattctaatgatttcagaagtcatagtgttttctttgaattcgtgtcgagaattttgtcttgcagtgatcaaaaccataccctgcatagtctagatttccatggtcctttctatggtaaacccattgttatgacaaatctcatgggctacgctgtctatcataatatccaacacttgaacatcaatgtcccttacaacatttctttatccgcccgtgttttctcttgtccatctttaaa

SEQ ID NO: 14149 - DNA, 312 bp, Glycine max
  Coding DNA Sequence Number=SeqID_4370
gttcccgtcaagcacgcggcgatgccgccgaggaagaagcggggggctcgccccgccgccaaccagccgccgccgtcgccgcccaagccgcccggccccgacgcgtcggtggaggagaagctgcggtggtccgccgaccaagagttcgtacgtcggaaagctgccatcagagctattcaagcagcagagactgagagcatactctcccggctgcacttggtgcgatcctacatttccaaggagcaactagaaacacccgccttgcaattttttcaggagaacttgcccaacgtgtcagttgtacggaacgaa

SEQ ID NO: 14150 - DNA, 581 bp, Glycine max
  Coding DNA Sequence Number=SeqID_4371
ttggtgttagtttcgactgccagcctggccgtacaagtaataagtaggatctactatattgctgtaagaagaaaacatgctgggcgtgcgcgaaaagaccgccgagacaggatgtcgggacgatatacggtcctcccctctgccttcgcacgagtttattagagccgcgacctatgtgtgcgtgtcgtcggatggatgttgggtatataaaataacgggcgggccgatagattaaataagcgcgcggcgcgggggttataaggtgtggaggaaatacatgcgcgccaggcctcgcgcgcgcggcaatatagtataatacaatgtagtgttgttgatacaaacgtatgtagcggcgcgtgatagtatcatgcattatgaatagtcggccctctgtgggcgggcgtattagctgtatagataatatatatatcgcgacgcgccgtcagatttctgcgcagcgtcatatatcgagagactgagctattaatcagcggccgcggccccgcgcgcacatgagaggactattgtagggaatgcgagtcgggcgcggcgcgccgtagtgctgatcacatctgtgccag

SEQ ID NO: 14151 - DNA, 351 bp, Glycine max
  Coding DNA Sequence Number=SeqID_4372
cgggactagtcttgtgtgaaataggttcttttttaagtaatatcctcattgtcattaattttctctatatgagtcaaagaggttattttatcaataagctagaagtaaaactaagtgggggttgtttaaatgggttcctactacacacttttttccattttttttcttcattttccattgaattcaataaaactctttctatttcttggtttcctcatatattaactttggaattttaagctttaatgttcagggttggcactcgatgctgcttcttggaataagtgctgccataaggggaattcgattgaccgcccttaaagaaaggattaaattccactgatcatcctt

SEQ ID NO: 14152 - DNA, 259 bp, Glycine max
  Coding DNA Sequence Number=SeqID_4373
tttgccctactataggacacctgctatctggctcaaaatctgtttgcttgatgtctataaaaatatttgcaagtatgcgaataatggtttgacctcgtctaacattgctgtcattctcagagattgttacggtattgctcatgtcaatagcgtcactggcagctaaatccttcgcatcctcaaagctcacagacttgcgcctgagattccagacgacctgtaccatcttgattataggtgtgtttcaattcaagaagcc

SEQ ID NO: 14153 - DNA, 576 bp, Glycine max
  misc_feature (195)..(195): n is a, c, g, or t
  misc_feature (401)..(401): n is a, c, g, or t
  misc_feature (421)..(421): n is a, c, g, or t
  misc_feature (484)..(484): n is a, c, g, or t
  misc_feature (537)..(537): n is a, c, g, or t
  Coding DNA Sequence Number=SeqID_4374
ctcacctcataccaatacctattttggtacatgcactgatgagtacgctctcgaacaacactaatgtatacccataatccatagcgtgatagtcactatatcgagtccactatctactacactgagagcatgtaattcatcatatcatagaccgacctcgtgagacacacttactatcatgagtcaataaaactnctagttaactatacgattatatccttcatctactatgcgtcacaacgcacacacatcataatatacaaatcttgcctatcgtcagccatactcatagtctcgacacacatctctcgcattgacatatataatctatagattaatctataacagcaccattctacgactctgatatccagcttaacgctatatatcaattggtgtanctacatgcgatactagtacncgcacacgactctagacagagacctacatgacatatacactcaactcacacatgtaccatcgntcacagtatatacacacagatatactgtgaactagtcatatacagctcatagntattatcctacaacttactcccctatactgatggtcata

SEQ ID NO: 14154 - DNA, 384 bp, Glycine max
  Coding DNA Sequence Number=SeqID_4375
cacccgtgggcggatgccagaagacgacatacgggcaccttacctcaactcaaacctgaggaaataactaccataagtggtgactataatgagcctgtatcactcactacaactggattgtatatcgtgggcaccaaatacatggtcatccacggtgagcctggtgctgtcattcgagggacgaagggtcctggtggtgttactgtaaagaagaccggtgcggtcttgatcattgccatttatgatgaaccaatgactccaggtcaatgcaacatgctagtagaaaggctcgtcaattatctcattgatcacggtctctaatctatgctacatgtccagctatcgagcatattatattggcttgtgtacactttcttgcataca

SEQ ID NO: 14155 - DNA, 452 bp, Glycine max
  Coding DNA Sequence Number=SeqID_4376
agagcggcgacctgggcacagaaaccccggtgcctctgaaataagtacacgattcagtttgttttttttattttaattgagctcccaaattgtgtctgaattatacgataaaagtttggaaaaattcatatttgtcttttaagaaaaacatccaggtagccccagtgcagacatcaaaaaaaggaacagcccagcgccctccactacgactactactacgtgcatgaggccagatagtctaatgacggcagtacaaacgttaacaagtctaattgatactggctatactttccagtaagcagcacggaaggcgttgcactccatataaaggagctcagcgctttagggtgtcactgggcacggacattttagctactcctgcaatgcaggctcccggacatggggcagaactacatccccttgaaatggaggaccttgtccggactatcaaa

SEQ ID NO: 14156 - DNA, 421 bp, Glycine max
  Coding DNA Sequence Number=SeqID_4377
ggagtaagtcctgcccggaacaccaacagcattggggtgcgtataaacacccggggttgtttcgagcaattgatagctgttgccggcattgtcccggatctttacaaccgcacccgaaacaggagggaagctgttattgtcgctgaacctgaccgaccgggtgatggtgacactggcaggcccctggttgttcacgatcccttcaatcacaacctgcgaaggcgcgttgtttaaattaacatcgatcacttttttacaggaagcaaaaaggagcgacagtatcaacaggcggtatgtatattttgtaagggttgacatgtgatcatcagaatttaaaattccaggtaatactcggaatgaatttgaacaaagccgttcgtaaagcctgtgttttttccgggtgatcgggatcatcctggaa

SEQ ID NO: 14157 - DNA, 426 bp, Glycine max
  Coding DNA Sequence Number=SeqID_4378
gcctgttctcagacgacgggttctccggtcgactcgactggggtctcagggttaagggacggcgcgaggacaacagaggggcgaggagacagctcgggcaagcgcaccagttctacacgcggagccacgggggggcgggcacccgctgaatcaggttatcagaatgggtgaataccgaacagagggttaggcataaatggagatacactttcggttaacaaactagtggtttagtctgcttatcatctttgaaccgtcgtctattgctgttgaatcagtgcacagaaaactagtgttttcatcctgttatcatcttattatcgctgaatctgagacttatgacgtcgtctattgctgttgaatcagtggacaaaggttatgatatatatgatgccgggatggaaatttttgcaataaatcgtcgtc

SEQ ID NO: 14158 - DNA, 495 bp, Glycine max
  misc_feature (188)..(188): n is a, c, g, or t
  misc_feature (279)..(279): n is a, c, g, or t
  misc_feature (291)..(291): n is a, c, g, or t
  misc_feature (293)..(293): n is a, c, g, or t
  misc_feature (351)..(351): n is a, c, g, or t
  misc_feature (409)..(409): n is a, c, g, or t
  misc_feature (412)..(412): n is a, c, g, or t
  misc_feature (421)..(421): n is a, c, g, or t
  misc_feature (461)..(461): n is a, c, g, or t
  Coding DNA Sequence Number=SeqID_4379
gagtgatgtgtggtggtctaataataatagacaaataacaacattaatgcgacacaccacaagcgcgcatcacacacacacctggctgtggctagcgtgtgacaactatacaccaacacagacacacctacacaactcactcatacaacagtgcatggcgggcgataatataggtacatctgtcgcgncatgaggcagacacaaactgtcaacgacacgtacaccatcacgtgcggcggaggcacatgacaccctcgatatgcatcaagacatccatcngtattgcgctcngnagtgaatcttcgtgtcatcatctgtctacacaacagcaacatacatagatcactgcgncgtggatacacacacacagcactagctcacgtcgcgacgcagagtgtgagatgactanacnaataacatnagagtgagacgacacagacaaaaatatatgcgcaactctntagtggctggtacacatgtggctcgtgtcgatct

SEQ ID NO: 14159 - DNA, 559 bp, Glycine max
  misc_feature (27)..(27): n is a, c, g, or t
  misc_feature (34)..(34): n is a, c, g, or t
  misc_feature (60)..(60): n is a, c, g, or t
  misc_feature (113)..(113): n is a, c, g, or t
  misc_feature (318)..(318): n is a, c, g, or t
  misc_feature (480)..(480): n is a, c, g, or t
  misc_feature (510)..(510): n is a, c, g, or t
  misc_feature (516)..(516): n is a, c, g, or t
  misc_feature (521)..(521): n is a, c, g, or t
  misc_feature (530)..(530): n is a, c, g, or t
  Coding DNA Sequence Number=SeqID_4380
aatgtagtgtgtgttgacctcttctgntcatcanatcattaaagagatgcgcccgctacncactattctctcgcgtctgccactacatcgccgtgatatatactaaaattatntatatcacctccctctcacatacatcacctctgcatcatctacatataacacatcatattaatacaacataagctctatattactaacatgttattgtgttctatattctgtgcgcgcgcacttaatacaaaacaaaagatattcgaacgacccacgcgcgtgtgtgcccgcgcgctagcgtgtagcacgtacctcaacacgctntacgtatcatatatattataatatctatgtctatatacttactgagcaccactattctaattcactgtaatgcatatacaataaatacgatcatagcgcggaccagcaccgacagacctactccctcacacaccaccacacgagcgtcaacactatatagantctctaccgcttcatcatgcacacgtgttnatgcgncgagnctcgtatantactactatctctacccacagctcgatgt

SEQ ID NO: 14160 - DNA, 299 bp, Glycine max
  Coding DNA Sequence Number=SeqID_4381
gcagagtccagtagtaaggcgaagatccagctgtacccgacgccgtactacgtaaatggcttggagccgctgatgaaccagcagactcttgagtaacattgggggaaacaccacaagacctaggaggaaattctgaataaacaacgagtagggacagagctcgaggggaaatcactagaagagattatagggacatcatataaattgggagacattctcccagctttctacatggcagcacaggcatgcttggctcgtaaccagaaactcttattcatgtttcacaaccatggcttagg

SEQ ID NO: 14161 - DNA, 588 bp, Glycine max
  misc_feature (547)..(547): n is a, c, g, or t
  misc_feature (562)..(562): n is a, c, g, or t
  Coding DNA Sequence Number=SeqID_4382
cccgcgtgactttggttatgtacatgacttttgtatcttaacatccacgcggttgtaccatactacgcgcggttatatgctctatatgttacatacatgtaattctgtgtattatttgagaatgatgaagtaactacataatacgtctgtattatcatccattcacgagaatgaaagcgcgacagttaagtcatgtgacgactatattatatataataaaataaacgcggacgcgcaattaatagcgccgcctctctcggaataatagcaatgatagaattaccgccctactcgcgcgcctcacgcaaatataaaaaccatatgattagatgtataataactcgcactgacagccgacacatgctgatcgtcctaaacaactacgtccgcgccgcggtccggcggcggtatgggaacaccaacgcgtcatagacaccggcgcgtcgctgatatctcgcgcgcacaattactcgcctcgcgatatatgtgtacgcgccccgcgccgcagatatatgtacagagtaatcacgacgccgcagactgcctncgcacatgcgaatantgactatactatcacacatctgcgcg

SEQ ID NO: 14162 - DNA, 595 bp, Glycine max
  Coding DNA Sequence Number=SeqID_4383
ctccgggtcgttagcttatctatacgccggttcgcgaggtgaagagtctcgagccttactggggggagcgggagacgagtccgtgcagtgcgggcactgcagagatgtaactgtactcagatgcgtaacttattcagtggcagtcatgggcacgagctagcacatcatgtcaatagcaatacgcatgggtgagccgcatggcgcgtcgatccgccacggatcgctctagcagactccttcgatgttataggatcgtggtggggtatatccgatgatcaatgtgacgtgacgcacaccattcgaccgtgatcagcctgtcatgacgccgcgtcatacatactacaacgacctgcgcaacccacctttcacgcgggatatgaaccatattgtattaggcgggcggtgtccgattacagatagactaccggtactggtgataacagatacacatctgtgtcgggagaacaagcgcactcacagcgccacgcgtccgttctcttttgggaaataacgtcgctttttcctccccttctgaaggaggcgtagtcgcactcgttgtcaacacagattatatagcgagctaacgttgtggcgt

SEQ ID NO: 14163 - DNA, 353 bp, Glycine max
  Coding DNA Sequence Number=SeqID_4384
gaaacaggcatcttttggtccatcatagtcacgcacttacaattcatgccacagtattgatacgcctcaagggtgttccatatgctggtagttcacgatgaagctcggatacagcatatctaggttttggttttccatgtcatggacctgtcacagggggtacatgccaagtatcagctagggttcatgtcttcatcggtcaattttggatgatctatgccaattcggtagtaatattccatctcagttggtagatgcagtcacatgtttggggtcgtattagtgaccagtggtcacagtcatatagatatccctgtcagagatttgtgaggccagttcccttaccattaaag

SEQ ID NO: 14164 - DNA, 346 bp, Glycine max
  Coding DNA Sequence Number=SeqID_4385
gcaaattcttggttctgctgacctggcggagcgtgacgcagatcatagggctcttatgtctttgctggggctagatgttgcagctcctttcacggctttgttcaagcacattggcactcgttcaagactctagcacggatgatgtcatgcttgagaaaggtatagactttgctagagataatgttttccctatccaagctaaatagctgaaaccccaggaggaaatggaaagacacataactgctctcattacaaaagagtgtataagatgtctctgccattctattactaatgttaatggatttcctgatgagtttgatcctatagtgaagaaactgctccggtt

SEQ ID NO: 14165 - DNA, 116 bp, Glycine max
  Coding DNA Sequence Number=SeqID_4386
gttggtcttgggtactcaagatacgagactgagagtgtattaatctgaccaaagctggtaggaatgcgcgaagcgtgtagtagcctatggagtgcttggtgtctttcgtttttctt

SEQ ID NO: 14166 - DNA, 580 bp, Glycine max
  misc_feature (204)..(204): n is a, c, g, or t
  misc_feature (413)..(413): n is a, c, g, or t
  misc_feature (465)..(465): n is a, c, g, or t
  misc_feature (481)..(481): n is a, c, g, or t
  misc_feature (484)..(484): n is a, c, g, or t
  misc_feature (549)..(549): n is a, c, g, or t
  Coding DNA Sequence Number=SeqID_4387
aagacagcgatgtgctagacaggaaaactcataggcggtaggcgagaaggtggagagagagagagggccaagaatggaggaagatgagataacaacacgtaatctcatcaatgtatattattcattcacaaatgttgggtcgacacagtggtactcatgcatatagttatggatgtcgtagttgtatgtatcactattgcttantcctttatataacattgttttagtctctactctctttttttcttcttctttctcactcttctttctctcatcttgttattcatcactatattctgctgtcttgttctctttctttatagacaatattaacacatgccgcggtgtagttaggagatgaatatgtacatatggtgtgtgtcgaggaactagataggtgggggataaaagtngtggtttgactgacagggaaagaacatatccctaatagaagctatgaagtgnatgtgctacaaaagtntanatataattacaaataatataagaagtaatgagatagttagttctattataatcttgtcgaaactnaggatggggctaaattactattgtcaaccaa

SEQ ID NO: 14167 - DNA, 563 bp, Glycine max
  Coding DNA Sequence Number=SeqID_4388
gtggtgactcatacattatcctttaccagccaacacatatacactaacaagaaccctctagttggctgtgcatcctctatatacctatcataacacaagcagcacaagcctatcagagtcaactatcattccatagaacccaagcccctacactcctgagagatcattcatagtcatcacatccaaaacaacaggaacgaaacaccttgctagaaagggtttgtcatgatcatacattattactggctactgtgccttatcggcttatcataaccttatctgattttattgaaggatgaatctatgataagccttagattatgacaaaggcagcccttgaaaacggctctgattctacagaaaagctattactgtacttataatatactataagccaaggaagctcagaatcttgtcagatctcaacttgaaatttttgaaaagatttttaaaaggtctttgagatgaacaacaaccaataaggcctccttcatgatccaaagttcgctgctccttcaaaggaaagaaccagctgctggaggaatccttattagctgctacaa

SEQ ID NO: 14168 - DNA, 426 bp, Glycine max
  Coding DNA Sequence Number=SeqID_4389
agagagaggtttctttcgctttcgctcgattatcgcgcccatggcgaaaccaagccgtggccgtcgttctccttccgcctccggatcctcatctcggtccagctccagatctcgttcccgctccggttcgagtcggtccaggtctctttcttcttcgtctccttcccgtagcgtcagctcagggagccgcagccctcctcgtcgcggcaaaagttctgctggggctgctaggcgaggtcgctctcctcctcctccaaaaggagcatcttcaccctctaagaaagctactacgcctattcaggaatcacttgttctccatgttgattgtcttagcaggaatgtgaacgaaggtcatctgaaagagatatttggaaactttggtgaagttgtgcatgtagaacttgcgatggatcgagctgttaatct

SEQ ID NO: 14169 - DNA, 357 bp, Glycine max
  misc_feature (115)..(115): n is a, c, g, or t
  misc_feature (237)..(237): n is a, c, g, or t
  misc_feature (255)..(255): n is a, c, g, or t
  misc_feature (332)..(332): n is a, c, g, or t
  Coding DNA Sequence Number=SeqID_4390
gtacacgcagacaactgacacaacgatataccgcacagcgcgccgatgctagcgtagcgtcggtgtccatcggtacgtggcggccagggacacgttgaggggcgtgcagaggacngtagagagcgcgcagagagtgggtagtataccatgcgtggtattatacttcccgtgttcaacagcctcactgtatcaatgtactacgtcggctacgagatatatagactatacaccgcgatncataccacgtcagatcanatatgagatatcgcaatcacgcacagaaatcacaagactccatacctccacagcatattcgtaggcaaacgtctttntacatacactagaagactatcacgt

SEQ ID NO: 14170 - DNA, 388 bp, Glycine max
  Coding DNA Sequence Number=SeqID_4391
ttggcctccatttccattctgttctttaaagttcaccaaagatctcttctaaaactttgctctcacctctctcctaaagctagggtttcgcacagcctccttgtttccggcggtcgccaccgtcatctcaggtgaccgccgggccttctctcttttttttctttttttcgtagtctctgtgtcctcgtcgtcgtctcctcctctgtctctctgcggctgcttgatgcgacgacggttgtccggttcagatccggagctttgcttgttttagggtcagatctcggaggttgcagcacttgaggacggtgctccgctcctccttacctctgtttcttcgtggccagttgaggctctgtccggatggttttgtatgccgtcgttgtgttta

SEQ ID NO: 14171 - DNA, 577 bp, Glycine max
  misc_feature (44)..(44): n is a, c, g, or t
  misc_feature (83)..(83): n is a, c, g, or t
  misc_feature (204)..(204): n is a, c, g, or t
  misc_feature (413)..(413): n is a, c, g, or t
  misc_feature (415)..(416): n is a, c, g, or t
  misc_feature (424)..(427): n is a, c, g, or t
  misc_feature (432)..(433): n is a, c, g, or t
  misc_feature (436)..(438): n is a, c, g, or t
  misc_feature (444)..(445): n is a, c, g, or t
  misc_feature (450)..(454): n is a, c, g, or t
  misc_feature (457)..(457): n is a, c, g, or t
  misc_feature (459)..(459): n is a, c, g, or t
  misc_feature (461)..(461): n is a, c, g, or t
  Coding DNA Sequence Number=SeqID_4392
tatatagtctcgttgttctccgtattgttgtgtgttgtgtgtgnccgcaactaatctgtgtggtgtgtcatcaacttgtgtgncgtgttattatgttatgttgtggggtgtttgcttttattatcctcaccaccacccccccccctcgcgtaagtgcgtggtgttgggtggtgattgtttaatataattctctgcgtctctccncttctgtatgttactatattgtgttgtgtgtgtgtggtgatgaatagctgatattattgtgatataatatttcatgctggcgtgtcttgttgtgatttaacgtatacatatctttctgttgtgcctgacgctgttgcgtgtcggtggtgtcgcttgtcctgttctttatatctatgttgtgaggtgttgtatatgatatgtgggtgtgngnnattgggtnnnnccctnnggnnnttaacnnagggnnnnnaanananaaaaagaagtggtgtgggtgtgtgtgtatgtttgtatgcacctccgcggcctctcaccactcttcggtgtgtactgtgtgcgactcatagtctcttgtcgtcgttgatgtgtcgta

SEQ ID NO: 14172 - DNA, 495 bp, Glycine max
  misc_feature (26)..(26): n is a, c, g, or t
  misc_feature (34)..(34): n is a, c, g, or t
  misc_feature (68)..(68): n is a, c, g, or t
  misc_feature (72)..(72): n is a, c, g, or t
  misc_feature (86)..(86): n is a, c, g, or t
  misc_feature (89)..(89): n is a, c, g, or t
  misc_feature (104)..(104): n is a, c, g, or t
  misc_feature (113)..(113): n is a, c, g, or t
  misc_feature (119)..(119): n is a, c, g, or t
  misc_feature (134)..(134): n is a, c, g, or t
  misc_feature (144)..(144): n is a, c, g, or t
  misc_feature (156)..(156): n is a, c, g, or t
  misc_feature (165)..(165): n is a, c, g, or t
  misc_feature (169)..(169): n is a, c, g, or t
  misc_feature (179)..(179): n is a, c, g, or t
  misc_feature (187)..(187): n is a, c, g, or t
  misc_feature (208)..(208): n is a, c, g, or t
  misc_feature (227)..(228): n is a, c, g, or t
  misc_feature (230)..(230): n is a, c, g, or t
  misc_feature (232)..(232): n is a, c, g, or t
  misc_feature (235)..(235): n is a, c, g, or t
  misc_feature (246)..(246): n is a, c, g, or t
  misc_feature (263)..(263): n is a, c, g, or t
  misc_feature (270)..(270): n is a, c, g, or t
  misc_feature (276)..(276): n is a, c, g, or t
  misc_feature (285)..(285): n is a, c, g, or t
  misc_feature (293)..(294): n is a, c, g, or t
  misc_feature (312)..(312): n is a, c, g, or t
  misc_feature (314)..(314): n is a, c, g, or t
  misc_feature (318)..(318): n is a, c, g, or t
  misc_feature (323)..(323): n is a, c, g, or t
  misc_feature (330)..(330): n is a, c, g, or t
  misc_feature (350)..(350): n is a, c, g, or t
  misc_feature (354)..(354): n is a, c, g, or t
  misc_feature (357)..(357): n is a, c, g, or t
  misc_feature (386)..(386): n is a, c, g, or t
  misc_feature (395)..(395): n is a, c, g, or t
  misc_feature (417)..(417): n is a, c, g, or t
  misc_feature (430)..(430): n is a, c, g, or t
  misc_feature (438)..(438): n is a, c, g, or t
  misc_feature (447)..(447): n is a, c, g, or t
  misc_feature (450)..(450): n is a, c, g, or t
  misc_feature (454)..(454): n is a, c, g, or t
  Coding DNA Sequence Number=SeqID_4393
actgcggatctactagtcaatcaatncagatcgnctcgactagattatgtgctgcgatcgcgcgtgcnacgngcagtgtgtatgcnctntcgtgcatgctcaanacgcacatnaatgtnatatgtcattgactncgttactcgntagcgcactgcngcaatctanacgnacgcgggcgntgaactancactgagtgaatcgctgcgtnctgtgtaatgtacgatatnntnanacntcgctacacgnctagggattatactacngtcactngaccgnactgtgctntatgacgnnatgtgagtcgctgacgtngncgcncgaantgcggtntgctatgatacgtatggaancggnacngtgtgtgatcgacaggactcgcgtcaggncgacgatgnatctcgtatgctgcacgtacantacagcacgagancgtcgatncgagagaantgntgtnctcgtactgttagacgcgtacgcatcctccagtcatcatta

SEQ ID NO: 14173 - DNA, 414 bp, Glycine max
  misc_feature (203)..(203): n is a, c, g, or t
  misc_feature (205)..(205): n is a, c, g, or t
  misc_feature (223)..(223): n is a, c, g, or t
  misc_feature (241)..(241): n is a, c, g, or t
  misc_feature (248)..(248): n is a, c, g, or t
  misc_feature (295)..(295): n is a, c, g, or t
  misc_feature (341)..(341): n is a, c, g, or t
  misc_feature (370)..(370): n is a, c, g, or t
  Coding DNA Sequence Number=SeqID_4394
tcactcatctcgttactaagtaccatggtcacactgtagatattatattacatctctatatagtacactgtgaagagagggtgtgtttaatattagttttagagtagtttcatcacaacacatacaaacgagcttgtagttgtgttgtttgtgttgtgtggcggtgtagacaaaccttcgcttcagctatgctccatagcgtngncgagcagccccgctcccngcctcgtccgcaggagcncccagcngccagcagagacgccagccaagaggacggccgccgcctcagagatgncgacccgagaaagagcacatcctcccaaccccgccgcacgcgcgcnggctgtcccgactgacagagcctcaagcncccacacccgacctctgagagtgatgagtagagacagagcgtat

SEQ ID NO: 14174 - DNA, 582 bp, Glycine max
  misc_feature (87)..(87): n is a, c, g, or t
  misc_feature (98)..(98): n is a, c, g, or t
  misc_feature (180)..(180): n is a, c, g, or t
  misc_feature (226)..(226): n is a, c, g, or t
  misc_feature (259)..(259): n is a, c, g, or t
  misc_feature (303)..(303): n is a, c, g, or t
  misc_feature (418)..(418): n is a, c, g, or t
  misc_feature (420)..(420): n is a, c, g, or t
  misc_feature (494)..(494): n is a, c, g, or t
  Coding DNA Sequence Number=SeqID_4395
ttagttccgagtctcgcgacgattagtatgcagttatcgtattctgcgatcctctgatctgtatgcacagccgcgctcggagctacnttggcgcccanattctacgaagagctgttgctcactcgccacgcagcgaatatgatctatgctggagcgtacatgacgacacaccctctcatnactcagcagaggtgcacgctcatcacacgtactgctgacgtacctntcgtgacatcactcgctctctatcgggacgatngagcgtgtagttctgcaccgatgacgaagtgggatcttcgcgtncgccgacgagatgatgacatctattcacgacgtcatctcgctacacgactgaagctctcgtctactggatcgccttagatcttacgcagtatcacgcctacatactctcctaggntntgacgctcggcatggtgctgctgtcctcgtacacaaccgacatcgagggctttcacagagtgatgcaatgtcancagaccgacacgccagtcaccgtacacatgctgcgtcgatgctactatacgttacgtcgacgcgctgacagtcagtcttacttctgaa

SEQ ID NO: 14175 - DNA, 550 bp, Glycine max
  Coding DNA Sequence Number=SeqID_4396
aaagttgttcaactcgctcctggtttccttacccaaacaagaagtcactgtaccacttgtaaaggtgaaggaactatctatgaaaagcaaaacgtctgcaaatcttgcaaaggtgataaggtcaagaaagagaccaagactatcgaagtccccatcgaaagtggtgctcccaatgagtgccctatcagcttcagcggtgaaggaaatgaaattcctgatgttttggctggagattttattgtgagactcatcattgagccccacaagagattcgaaagaaaaggtgctgatctctactataagaaaaagatctctttatatgaagctttaactggatgtgctttccacatcgaacatcttgatggcaaaaagattcttgtcagcacttatcaaggtgaaatcctgactcctggttgcaagaaacaacttaacaatcttggtatgcctttctataaggatgctatgagtcatggtaacttgtatattacttttgaagtcgagttccctaaagccaatcaactcaaaaatgccgctgatctcaaaaatgttt

SEQ ID NO: 14176 - DNA, 429 bp, Glycine max
  misc_feature (90)..(90): n is a, c, g, or t
  misc_feature (113)..(113): n is a, c, g, or t
  misc_feature (165)..(166): n is a, c, g, or t
  misc_feature (203)..(203): n is a, c, g, or t
  misc_feature (226)..(226): n is a, c, g, or t
  Coding DNA Sequence Number=SeqID_4397
gaaagctagaactcacgcactctttatcatctttattttcctcgtctcatgtcgttttctagtacaagcatgtgatagatgaggactgtngagaagaaagagtagagataganggagagaaacacttctagtgcaaataacaaacagaaaaaaagggaagagganngtttgagagacacacgtctgtcctcgccacgaagaangaaattttgaaatatagagcggntatggggtggtggagggaggggagggagaaagaggagtgttgacgtacgacgagacgtccggcgtaggttggagctatgcggaggaaatcaataggatcaaagtactgggtgtgttctggtaatgtggatgtagaaggagttaataatggaagaataaatattaatgaaatagagaaataaatagtacaaatcaaaaggccgg

SEQ ID NO: 14177 - DNA, 560 bp, Glycine max
  misc_feature (52)..(52): n is a, c, g, or t
  misc_feature (498)..(498): n is a, c, g, or t
  Coding DNA Sequence Number=SeqID_4398
gtgaccgtggagtcatacactgccacatcttactaatatctactgtcacgtncttaatcaccactgattcatagtaaggagagatgggtagtacagaagagacgcatagagtgtgtattagtcttataataaacgagtgcgtcctctctcgctcggtcgcacaactctgcgcaagtacccgacacacgtctcccgccgtcgcgcggctcgagcgcagtatcaatagtgagagtggttgtgagatagaagcgtatctactgtataacttgatgcagaggttgctaaatatgccggactatatgagtctcgctacaagtgacaagctacccctgctgatagacatgggctaaaatagtaatgtatacaaccagtgtcaccacatacaacaacccatccctcccgcgccccgtgccgccgagtgccgcatgacacaccccacccagcgagcgcgcgagcgacctacactcctactaccacgaacactcatacacactacangcgaatgctatcgccgatgaatatgtataacatcgttatctcgcccatgtactacggataag

SEQ ID NO: 14178 - DNA, 468 bp, Glycine max
  misc_feature (33)..(33): n is a, c, g, or t
  misc_feature (79)..(79): n is a, c, g, or t
  misc_feature (147)..(147): n is a, c, g, or t
  misc_feature (156)..(156): n is a, c, g, or t
  misc_feature (161)..(161): n is a, c, g, or t
  misc_feature (256)..(256): n is a, c, g, or t
  misc_feature (268)..(268): n is a, c, g, or t
  misc_feature (283)..(283): n is a, c, g, or t
  misc_feature (288)..(288): n is a, c, g, or t
  misc_feature (363)..(363): n is a, c, g, or t
  misc_feature (374)..(374): n is a, c, g, or t
  misc_feature (376)..(376): n is a, c, g, or t
  misc_feature (423)..(423): n is a, c, g, or t
  misc_feature (427)..(427): n is a, c, g, or t
  misc_feature (429)..(429): n is a, c, g, or t
  misc_feature (431)..(431): n is a, c, g, or t
  misc_feature (441)..(441): n is a, c, g, or t
  Coding DNA Sequence Number=SeqID_4399
aacacccggagccgtgcagcgcaagcccgccanacgcgcacgacggcgatctcctctgtcgtcgcgcacgcctctccgnctgcgctcctgcgtggcgtgctctcgtgttgcggcagtagtggggtacatcagaaagacactgcctgnctccggtgncgagngacgggttgtgcgcgtgaatcgccattgctatctactgcgggcacgagaagccgcttggtgtgtctttactaataatcattgtcacacacattcngagcaaccgttncgacattttttatanaatanggtttgtcttcttgagcgtgttgagtttgggttgtgttgtgtcgagtgtgtacgtggtgttgcctgttgtccgtngtatatctttntntttttcttaccatttatatatatatatcacttatcatatctcaatantcanantntgtatagtgntggggtatcgatatcaagtgtgtatat

SEQ ID NO: 14179 - DNA, 321 bp, Glycine max
  misc_feature (165)..(165): n is a, c, g, or t
  Coding DNA Sequence Number=SeqID_4400
gtttacaatgcctcacacatccagcttgtgcgtactcagactcttgtgaaaagtgctattgttcaggttgatgctgctgcattcatacaatgctaccttcagcactatggtgttgagattggtaggaagaagaagacagctgccaagaaagaaactgcagacganggtgctgctgctgttgctgtggaagaatccataaagactaatcatctgcatataaaattggataatcgccagacagatcgtaagcttgatgctcacatagatgagcatgatgatggtggccatttactctcatacatctccttctaacctagtcaa

SEQ ID NO: 14180 - DNA, 476 bp, Glycine max
  misc_feature (95)..(95): n is a, c, g, or t
  misc_feature (97)..(97): n is a, c, g, or t
  misc_feature (100)..(102): n is a, c, g, or t
  misc_feature (104)..(104): n is a, c, g, or t
  misc_feature (109)..(109): n is a, c, g, or t
  misc_feature (377)..(377): n is a, c, g, or t
  misc_feature (379)..(379): n is a, c, g, or t
  Coding DNA Sequence Number=SeqID_4401
actaacaagaccacattctcaacaaatatatatatatacaacatagaaactcaccacccttccctctaacatatacatctctcctcccaatgctntnctnnncnctctntactgccctcacacactcacataataacaataacactaactcttctcaaatttcttaatatacaaatacacttctattatatatatattcacctctatacctcctctcctaacttcatatatatacttctttcatctctcacacttctatatcgttcttctctacctctatcgtcttcctcacatcctaacctatcacactatctcatcactacatataaagcacactccttaccaaacaacataatacactcatatatacatatacntnctcaattcttatactatattacatcatcctcaacctcatctctataattatcacttattacacctcatcttctcttatacatcatatacatctctcc

SEQ ID NO: 14181 - DNA, 459 bp, Glycine max
  Coding DNA Sequence Number=SeqID_4402
atagctgatggcgattctactacaaccacaagtgagattacaatcgaagccttcttttctcaacttggaggcaagcgaatggacgaggttttactaaagaaccagaagtctcatgagaaaaaaatcagtcaagccttagtgcctgacatgaagaaaaatgcagctaacatcagactcgaaaacctcatatactacaaaaaattgggcgctggacagtttggttctgtatatttagttcgagagcggagtcatgacgagttcatggctcttaagtgtgtatcaaagtcgcaagttgctgaagctcaactagaaaagcatatccaacaagaaaagcaagtcatggaagcgatcaattttccatttgttatctctttcattcgatcttttaaagatgacaacaatgtatatttcttggaagaatacgtcaaaggaatggagctcttcgatgctattagagag

SEQ ID NO: 14182 - DNA, 475 bp, Glycine max
  misc_feature (33)..(33): n is a, c, g, or t
  misc_feature (140)..(140): n is a, c, g, or t
  misc_feature (157)..(157): n is a, c, g, or t
  misc_feature (257)..(257): n is a, c, g, or t
  misc_feature (285)..(285): n is a, c, g, or t
  misc_feature (354)..(354): n is a, c, g, or t
  misc_feature (372)..(376): n is a, c, g, or t
  Coding DNA Sequence Number=SeqID_4403
gtgtcggcactcgtgtgctgtgctatctacgtngcgtgttattgatgatgtgatcgtagtgtatgattataggagcagcagacgtgctcgcaggagcgaacgacgtctcacacgcgcgtgagtacagtcgtgtggcgtgnatctagtatcatagcanagtaaatgatatcagtcatctgatatgatcatgtagatcagacaagacacatcgacaggattaatagtcgtcgttagcgccggcaggatgctcagctcanagatgcagagatacacacgagctcagancgcagtccatcgtgatagtacgagcgcactactgggttctctgcgagtgcgcatcatatatacgttcantaatggcggacgtcaatnnnnnctctcttcacaaccattacactccacagatgtgtctgttcgtatagcagtgcgacgcgtgactgtctgtctgtcagtgtatggtacgtgctcgctcgaa

SEQ ID NO: 14183 - DNA, 543 bp, Glycine max
  Coding DNA Sequence Number=SeqID_4404
tgctgcgtgcagacctaacaagagcagacaaccacttaccacatgatattgtagcagtgtatatggcgtcgccgcctcgagtatcctctcttttcactccatacaccctcttccttcgtgcggctaagctctaatcactattgaacacacgacatagaatatcacaccgcatgtcctgtgctttctttcatataagatactcctacaacaactgcgagcgaggcagtgtattatacttggtaatgttttgtgataaaatatcactatcaccacacctctacccgcccatcgcgtttattttctctgcagtgccacgccccccgccacccaccatcatccaacgcacgcgtactatacacaattgacacatgcgctacgtacgatttgataatatacaagtgtatatagactccttgccacactacccgtcatcatccccaacagacaaaaagagtggatggagggttacaatattataaataacccagccctctacatttcatctacaccaccgctcttttgtatacttatgccgtctctcca

SEQ ID NO: 14184 - DNA, 495 bp, Glycine max
  Coding DNA Sequence Number=SeqID_4405
catggcgcgcggtggcagctcactccaccgtcgactgctcagcgcaggagtgcggcggcttcttccctcgggcgcgcggcggcctcttcgctcaggctcccagcggcctcttccctcgagcatggcgcgtgaaggccactatagaggagctccttcctccggcgtcggccaaccgacgctgcttggcgcgcggtgttgccgctctctctctctaggaaccagcaagcacggccgggcagtgatgcggataccagggtcgggcgagtggcacggacgcgcgtggcagtccggtggcggcgagtagtaccaggcgagcagcgcggtgagcagggcgaggtgacggcagtggcgtccttctggtattgtgcccggcgagaagtacggccggcggtgaagtacctgtttctgtgatggacttgattgcttttcctttttagtttctaggggtccttgtgtaaatttttaggacagctttgtaacttctctgtaactcca

SEQ ID NO: 14185 - DNA, 561 bp, Glycine max
  Coding DNA Sequence Number=SeqID_4406
ctcatttggtctttatagttgtacaaattttattttttaatctttataattaaaaatgatcatttttaatccttatacataatatttatatcttttttagtaccaaagagtttatataatatggactaaaagagattaaaaaggataaggtgatatactatttttttttttacttttttttttgttttgtttattcatttgtatgttgagaatccattcaccttatatagaataaaaaagattaaaaatgatatatatataggactaaaacaaataatttataagtataagaactaaagtagaatacaaataatttataagtataagaactaaagtagaatttataaagaataattgtataaaaaaaattatgctgacatgtcaacttcatgactcatctcagattttatatattatactaataaatttctaactcaaaatttgaagattgttaaatttatactaaaaaaatgcaaatttgattatttttctgcaaaattcaatctactttttactacttgttaaggcacagctattcttgctaacatttgcatttacaat

SEQ ID NO: 14186 - DNA, 446 bp, Glycine max
  misc_feature (109)..(109): n is a, c, g, or t
  misc_feature (326)..(326): n is a, c, g, or t
  misc_feature (376)..(376): n is a, c, g, or t
  Coding DNA Sequence Number=SeqID_4407
ctagtttttgcgttctctacgcgattatatgttgaaatattgacttcgtcttgtttgtgtttaccgattctaattctcattcctgtcggtttcgtcgttgtattcatcntagttgtgtggattctttctcatcacaccacgatatacagtctacagcccacacttatgtgtgctttcccttctcttcctctcgagttctacctctcgtcgctctagtctctggtctcttcttcttccgtatatgttgaggcgggaacactcattgaagatctactccacacaatcacaatcacccctatctccatctcttcacccacgtcgctctntgtgcgccacgtgtcgtttgcgtgagggtggttcccttgttgcgtacgcngggtcgtgtgcgtcactccgcacgcagcgtaatgccgagtcgcagctccttaaacccacataattctctt

SEQ ID NO: 14187 - DNA, 526 bp, Glycine max
  misc_feature (58)..(58): n is a, c, g, or t
  misc_feature (205)..(205): n is a, c, g, or t
  misc_feature (254)..(254): n is a, c, g, or t
  misc_feature (297)..(297): n is a, c, g, or t
  misc_feature (316)..(316): n is a, c, g, or t
  misc_feature (479)..(479): n is a, c, g, or t
  Coding DNA Sequence Number=SeqID_4408
gcatctactagcgttgactaccgacgtcaatgctgggtgatgcgcatggttaggatgntgagaagacgtctcggcactgatgtgctacagtcgcgtatacgctatcctcttgtgctatgtgctgtagctcacactcacctcaactcactcttacgctgtatcctctgtctatgtgataagtagcgacagagcactcacacatctncatgagctacgacactcatacgcacatgtcgtgtctggtagctctacanctgaccagatatcacatagcacatctccgtgaactctctcgcntcagtgcacgatgcttacncaccgtacgacgctactctgtattgacgcatcacggacacagtgaacctacgtcctatcgctaacagcgtacacgtgtcgatatcgcatgcgacagacgatcattactatatacactcaatacacgaacagcatatagtactaacgagttctatacgacttcncagctgatcgctggagtgcgtctgctctatcacacgctacatactga

SEQ ID NO: 14188 - DNA, 510 bp, Glycine max
  Coding DNA Sequence Number=SeqID_4409
tttccatcgcagttttactattctcctccctttacctcgctactgcccttaacgatgctccttgggctcctttgcaaagaggtatctatgaaaacagccccttccttactggtctttctgacttcggaggtcaaaacactcttggtcaagccttcgaaagtggactcttcaacactgttgaaggtggagttggtcaaatcttgaacgcctggtaccaaagagatgaaagaggtttcacttatatcgctgaacctcaacttgttttgcaagacggaagccttcaaaacagcaagtatggtatgcgtgttgaccctaacaatggtagaagagatattatctactggtctattcaacaactcctcgaagaaaacaacttacctactggcacaaacatcacttgggatgctgacactgatgctgtgactgttacaaccttcaatggtattgatcaattccttcaatatcaaggattccaacctttaaataactctaccgatcctgatgttgttg

SEQ ID NO: 14189 - DNA, 463 bp, Glycine max
  misc_feature (45)..(45): n is a, c, g, or t
  misc_feature (48)..(48): n is a, c, g, or t
  misc_feature (53)..(53): n is a, c, g, or t
  misc_feature (64)..(64): n is a, c, g, or t
  misc_feature (95)..(95): n is a, c, g, or t
  misc_feature (113)..(113): n is a, c, g, or t
  misc_feature (120)..(120): n is a, c, g, or t
  misc_feature (162)..(162): n is a, c, g, or t
  misc_feature (184)..(184): n is a, c, g, or t
  misc_feature (204)..(204): n is a, c, g, or t
  misc_feature (224)..(224): n is a, c, g, or t
  misc_feature (230)..(230): n is a, c, g, or t
  misc_feature (244)..(244): n is a, c, g, or t
  misc_feature (246)..(248): n is a, c, g, or t
  misc_feature (251)..(251): n is a, c, g, or t
  misc_feature (255)..(255): n is a, c, g, or t
  misc_feature (258)..(258): n is a, c, g, or t
  misc_feature (267)..(267): n is a, c, g, or t
  misc_feature (279)..(279): n is a, c, g, or t
  misc_feature (316)..(316): n is a, c, g, or t
  misc_feature (382)..(382): n is a, c, g, or t
  misc_feature (392)..(392): n is a, c, g, or t
  misc_feature (400)..(400): n is a, c, g, or t
  misc_feature (428)..(428): n is a, c, g, or t
  Coding DNA Sequence Number=SeqID_4410
gtcaggttagtgatagtgcagctcatagtaattagggtgagtggngantcgcnctagctgccgncgaaggaatgaacgatagaatatacgaatgnacagagcgcagacagtancacgccncacgcacaccgccacacgctagcagacctgacgctcgtccgntggggcgactgcgtgctccgtntgtgcgtggtgttgttgtanaatataatagaatctactcnagcgtngttcttctcttacntnnngantgtngtngcggtgagnatcggcagatgnggctcatcatgatgtatgtgtctactatgtatgttgntcttgctgtattttagaaataatagaggagagaagcgagccgcgcgcagctccctctcctcccttncgcccggccncggcgggnggtatgactatcttccttcatatcttcnacagctgggcagcgcgtacagcaccacctaatacg

SEQ ID NO: 14190 - DNA, 513 bp, Glycine max
  Coding DNA Sequence Number=SeqID_4411
gaagggaagtccattctacttttctaaaatagaccagcatatctatcttccctaattcatatctaatcgacactagtgtgatcacattaaagccactattttcgagcaacgtcttctactcctttgtcccaattatttcaacttctcttttgaggatggttcgatttctttgcactttttaatggcggctatgcttctgctccttccgccaaacacaaagcagaccaaggctttgctggagagatgttcaaatgtaaaagaactgatgcagatttatggtcaattgttgaaaaaaggcaccatcaggaaccagttaacagtaagcacgctcttggcctcatacgcaagaatagagttgggtaacttagcctatactcctatggttttcgacagcataagctcacctaatactgtcatatggaacaccatgattagagcatatactcaaatagtaatgacccagaagcagcgctgcttttgtaccatcaaatgcttaacaactcagtacctgac

SEQ ID NO: 14191 - DNA, 521 bp, Glycine max
  misc_feature (70)..(70): n is a, c, g, or t
  misc_feature (107)..(107): n is a, c, g, or t
  misc_feature (165)..(165): n is a, c, g, or t
  misc_feature (189)..(189): n is a, c, g, or t
  misc_feature (212)..(212): n is a, c, g, or t
  misc_feature (219)..(219): n is a, c, g, or t
  misc_feature (268)..(268): n is a, c, g, or t
  misc_feature (292)..(292): n is a, c, g, or t
  misc_feature (427)..(427): n is a, c, g, or t
  misc_feature (433)..(433): n is a, c, g, or t
  misc_feature (444)..(444): n is a, c, g, or t
  misc_feature (448)..(448): n is a, c, g, or t
  misc_feature (471)..(471): n is a, c, g, or t
  misc_feature (476)..(476): n is a, c, g, or t
  misc_feature (483)..(483): n is a, c, g, or t
  Coding DNA Sequence Number=SeqID_4412
taacgatagatgacgttcgcctatgtgcacagacaagcatcgtatcgacgaccaccaccatcaatagtanacgtatacatgtgctctgcaagtcttgcgcgcgcaangatacgtgtattgctagaccatgcatcagagcctgctcacaccagttgcgtctcgtanccactaaacttgctatacatacgncgactcgccgtcagctcgcgcgncgacgcngttccaacacgggtacgcacgacgacgctactctgctctatcgagctgngtcactatcatgatgtgacgactntcactatgtgcggtgacgtcgagatgtcagacagtgcaacggacacgcgatataccgactagtatcaggtgcgattctagcagtagtatactgaagtcgacgataatactgatagccggccgcagcgatgacacngacaancatgactcagnacanctacacgtcgctccccatgtcanatgtnatcatanatacataacctatgtacatctacactacgtcatgttta

SEQ ID NO: 14192 - DNA, 528 bp, Glycine max
  Coding DNA Sequence Number=SeqID_4413
tcccttgacctctccaaagaaaaagatcttataactcctcttaaagatgttaatcctcactctactgcatctcagaccagcatcaaaaagctcggactcttgctagatccacataaggaccgctccctagcggcccaggtcatgacaagcacgacgacagggagctctatgcatgcgtcccctaagagccttttggaagtgtcaaagaaattcagcaaactgaaatctacaaatgcaaccaatacttcaggggaattcacattgataagtcccaaagatcttgtaagaaaggcaatgtcgaagctgaaaacaaaggagaataataatacaaagcaggagatgcagaggacagcaagtgcaacatccaagaatttcaggaaatcattgagtctgagatttactccacagttaactgataaaaaagatgaaaatctcaagacattgtctccaacttttgaagagagcgttccattaacaaggactacaagtgcatcaaataaagagaaggcagctaaattacgtcggatg

SEQ ID NO: 14193 - DNA, 408 bp, Glycine max
  misc_feature (196)..(196): n is a, c, g, or t
  misc_feature (224)..(224): n is a, c, g, or t
  Coding DNA Sequence Number=SeqID_4414
aattacgcgggctcactgtatcgttgtttatacccccccacaaatgtgaaaacccctcgcggctaccccaacattaatccgctttgcagattcattcccccgtttccctccactttggcaatcaaaacccgaagaaggccccgttacccgtatccgcccttttgccaacaagtttgtggttaatccttgctttggncccaacgcgcaaaccttggaaatgcgtntaatcattctcggccacacgattccgcagctacactttttgatcaaaatccagcgttctctctctgttatgccatacctaagcctcaaaccgcgggatcaactccccttctttcattccaatacaacctattaccgcaagctacgcgagtaatgcgtgctacgtccccaacgtttagatagcca

SEQ ID NO: 14194 - DNA, 366 bp, Glycine max
  misc_feature (97)..(97): n is a, c, g, or t
  misc_feature (209)..(209): n is a, c, g, or t
  misc_feature (233)..(233): n is a, c, g, or t
  misc_feature (287)..(287): n is a, c, g, or t
  misc_feature (292)..(292): n is a, c, g, or t
  misc_feature (297)..(297): n is a, c, g, or t
  misc_feature (308)..(309): n is a, c, g, or t
  misc_feature (326)..(326): n is a, c, g, or t
  Coding DNA Sequence Number=SeqID_4415
gtggtctgcaagatacagtaaacgacacgaatacacatattacagaacatattacatctatcacatatttataacatatcacatctacatacatganacaacatactactgtacgtagcagtgacggattactcatgtagcacgcacactataagcagtacacactcacccagcagtatagcaggcagctgcgactcacacagatatcncaatctcctatcaactgacatacntcacagcgaacacatacagtacgatcgagcgacatagcgccggagaacgcgcgnaaacnaggtngcatagtaganncaacacaagagacgatnactacgcgatgtgtcagtgtacgagcgtcagtattcccaa

SEQ ID NO: 14195 - DNA, 556 bp, Glycine max
  misc_feature (97)..(97): n is a, c, g, or t
  misc_feature (135)..(135): n is a, c, g, or t
  misc_feature (204)..(204): n is a, c, g, or t
  misc_feature (251)..(251): n is a, c, g, or t
  misc_feature (284)..(284): n is a, c, g, or t
  misc_feature (299)..(299): n is a, c, g, or t
  misc_feature (369)..(369): n is a, c, g, or t
  misc_feature (376)..(376): n is a, c, g, or t
  misc_feature (396)..(396): n is a, c, g, or t
  misc_feature (411)..(411): n is a, c, g, or t
  misc_feature (417)..(417): n is a, c, g, or t
  misc_feature (423)..(423): n is a, c, g, or t
  misc_feature (445)..(445): n is a, c, g, or t
  misc_feature (449)..(450): n is a, c, g, or t
  misc_feature (491)..(491): n is a, c, g, or t
  misc_feature (493)..(493): n is a, c, g, or t
  Coding DNA Sequence Number=SeqID_4416
acagatacatacgtgtgcttagatagatatacacaagcgtgactctcgatacctatcccaacaactagcagaatgtgatacccacatatatcatatngtgatgtgatgcactctactaccactctcactcacaanatccgctcgatcgtatatacgtgtgtcgaacgacgttaacgatcacgcgacacaggtacagttcaccanactcgtcctatcacggttatgaacacacagtatatacgtgcacactnatctatcatatcacgatgacatgactatgtganactactacttcgcantacgtcagtcaacacgataatcgtggtgacaaaagcgccgtgcacgatgactcgcagagagcactcgtancgactgnatgatgtactcgataccacntagatcaccgaatancttacnaatcantagacgacgacaatatacgacntatnnatatagtacatcatattgatataccatcaactactaatatntnagtcacgatagcaacctacaaacgcatctactgtcgtctatccctatagacgacatcacatga

SEQ ID NO: 14196 - DNA, 404 bp, Glycine max
  Coding DNA Sequence Number=SeqID_4417
tcaagctatactaaccaagtccccaccactggtctcaccggcaacactaaccaattggctggtggcttcaacaacgccaacgttgaccccttgagaaacaacctcaacaatgctaaccaattgggtggcttcaacaatgctaacgttgatcccttgagaaacaacctccacaacgctaaccccatgactggtggcttcaacaatgctggtgttgatcctttgagaaacaactacaacaacactactaaccccatgactggtggtttcaacaatgctggtcaaatggctggtgacttcaaccaagctcctggtaccttcaatacctacagcaccaagcaaactattcttgacaagcttcccggaaagaacaagaacactatgggtttcggaactgtcaccttcag

SEQ ID NO: 14197 - DNA, 484 bp, Glycine max
  misc_feature (300)..(300): n is a, c, g, or t
  Coding DNA Sequence Number=SeqID_4418
gaagtttcaattcactgtgcgttaatgaacagttggagatttcttctcgtggttgcgaaccagttcataaatggacgaggccagtgcgaggtttctattcccctgtgtggacaaaacgcctccatgttgaccaagtggtgcggctattgcgaatcctctttgtctgttgaagataaggagacagcaggcgcgcttactgttccttacccctctggatggccgcagagaataagtctcccctagaccgttagggcgtggatagcacgtagatgcgcagggaacacaacaaagcactcccgnagcggagttatggatgcccttggactggcgagcatagggatgacgtcgtgtgagaaggactatgagccccgtgatatctagagttacactagcatgcggtcctgggggcggggcgccatcgttcatacgtgttatagagtgtgagcgtgactgtttttcacatcacattcttcttggtggcggg

SEQ ID NO: 14198 - DNA, 480 bp, Glycine max
  Coding DNA Sequence Number=SeqID_4419
ccaacacttgctgtgaagaacgtcactcctcaagaagcttggagtggagttaagccttcagtagaacaccttcaagtttggggctgtgtagcacacgtgcacataccagaggcaaaacgaggtaaacttgatgataagagctttccttgtattttgttgggtatgagtgaagagagtggaacaaagaggagaaacaaagaagttgtccaagagggaaagtagaggcagagaaagcaagaccaatggaagaaacaaaactggaagctaaaggaagagaaaaagctgaaaccaaagagggtggtggtgaggaaaaaggaatgagaagagaagaaataggagaagaaaataaacaatccagcctggaagagatttttaagtacagagctgaagctcaacagaaagttaaggagagaaacgagagagcaaaacaagcagcaggtggtaggggtgagagaaacaagcaggcaaatgagaagaagg

SEQ ID NO: 14199 - DNA, 468 bp, Glycine max
  Coding DNA Sequence Number=SeqID_4420
tgaaattttggcctgttggaccacagcatgtcaagcacttccaccacatacagaattccctacaacaataacgtggttgaaattcagaaattgttcaagcaaggaaaccaggctgttgagaacttcaaccacatggtgaattcccaagcaagcaccaacaatattattggagatcaagggttttcattgagtagcatgaataagggcttggagcacatggtgatgccgcggattgaagagtgggaaagtggagaaccaaaaagaatggagaatcaacaggtactacaatcaagtacttcaaacgctactgaagagcacttaaccaaagatttcatgggtgttggagcagtgatgaacctgcaaagccagttccatggacattactgatcatggagatagcgagctaggttcaaaaagtaattaatgaagttaaggttaaggtagtgaagttttaggatacagtgagaa

SEQ ID NO: 14200 - DNA, 252 bp, Glycine max
  misc_feature (60)..(60): n is a, c, g, or t
  misc_feature (147)..(147): n is a, c, g, or t
  misc_feature (176)..(176): n is a, c, g, or t
  misc_feature (219)..(219): n is a, c, g, or t
  Coding DNA Sequence Number=SeqID_4421
aaatcaagacgtattgagcgagcatacaaaatatatttatagaggaatcaaacttatgcnagggccttggcgatcttgtcttggactctcttctttctttcttccaaagtgaatcttctgtttctgaggtacttcttgccaccagcngtttggacgatggtctttctcttatcggngtacttaacttcagccttcttgccttccttcttggcgggggcnacggggttctttctgatttcttcgtgaaccttg

SEQ ID NO: 14201 - DNA, 148 bp, Glycine max
  Coding DNA Sequence Number=SeqID_4422
gcatcaatgctgtgcgcccatggcacagaggttgaatcgagaatccgccccatgggttatgttgcttatggcctgccggctacatgttcctcaggtgttgctcttacaaaaattatagtcgcaaccactctacagtctcgtgttctga

SEQ ID NO: 14202 - DNA, 393 bp, Glycine max
  Coding DNA Sequence Number=SeqID_4423
agagagaattgaaacgtcgggagcaatggcgagcaccaaagttcaaaggattatgactcaacctatcaacttgatttttaggtttcttcaaagcaaagctaggatccagatttggctttttgagcagaaagatttgaggattgaaggaagaatcactgggtttgacgaatacatgaacctagtgttggatgaagctgaagaagtgagcatcaagaagaacaccagaaaacaacttggaaggattcttcttaaaggagacaacataacgctgatgatgaacacgggaaagtgatagacttttctctcaagaaaaactctcaaggattagtacatgggcttttcgattatatccaaagcttttgctaagtacatgttgagttgagctcctcttct

SEQ ID NO: 14203 - DNA, 423 bp, Glycine max
  Coding DNA Sequence Number=SeqID_4424
cacccacaacatacagctagaacgaacgcccgagcgagcaatcagccaccaagaatcgatcggagaaacagaagagacgtgagcttttgagcaagtagaggagagcagcgatggcgttggtgcctgggtgcgtgcagtgcgggacgcggagcaacccgtgccggtgcaaggtcgtcgggccgacgctggggttcgtggcgttcgtggtgaccggcgtcatcgagtggccgctgggcgcggcggtgtacctgttccgccaccgcaagggccgccgcatcatgggccaccccgccagggtcgtctacccgcgcgtctccagggccatccccatctaatcctgttctggtctggtctgatctgatcccctcctggctgtgtgtacgatgtaataatgcgacctggtccgtcagcttgtgttgttga

SEQ ID NO: 14204 - DNA, 535 bp, Glycine max
  Coding DNA Sequence Number=SeqID_4425
ttaatgctggcgtctaggtgctccagtcattgccacccctcctcctatctcctacccgtctccctatactgggtggatacacttaatacctaacatatgctcgcagaatatacaaatattattaatctatttataaacacatataagatcataacaggatatactatatatgcgcgtactgtgcagcgccctggcaagacagtactatcagttgggcggtgactattttgcgcgcagagagatatctaaatcggcattccgggatacacattattgcttcttcctattcagatgtgatgtgaacccaacataccggaggtgagagcacagaggggtggtaagattcccgtgttttatgtgtgggttggaggagggggggggggtcatttttctggcatcaacatttctgcttttcctcggctggttgtttcttctcacgcaataaatataacacctcgatcccaccctcggctctagcccgcagttgtatgttgtagaattttcttgggtgggtgtaggctgtttccacagtcaa

SEQ ID NO: 14205 - DNA, 498 bp, Glycine max
  misc_feature (138)..(138): n is a, c, g, or t
  Coding DNA Sequence Number=SeqID_4426
gtcttagttgatggttaggagcgattgtgataagttatacaagacgagagcaaaggaagggagaagacgactcatctcaaaagacgtacacacaacaaacataaacaaccaagagagaacaacaagcgtggaggtagnttctgtttttgataatatagtacgagttgactgtacattccacaaacatacaagcacttccttcctcttcgatactatacttactgttgcgtgaacagcgcctggttctctgttttgtgttttcttttgttatgttcgtggtgttatagattttttattagtgttaatttcccctatcagctcccctattcctaatcaatactaccctactataagatttccgttccagcgtctaggagggcggcctctctttctccatctccaccctcactcccccccccccaactgatattattccacatataatagatgggatacagcataccaatcataacgtgtaagagctcgttttaaagggtg

SEQ ID NO: 14206 - DNA, 306 bp, Glycine max
  Coding DNA Sequence Number=SeqID_4427
tactatgccagtcattgcacttagtgcccatccatttgagtcgctgttggtgaatctctaatcccggatttgcagctgaaaaagggacaagtttctattcattgaactgggcttgaatgggtttgaaacaaatgcggggaaaaactctttcttcaaactggtgtgaaaaacagggcttgaggggggaataaggtttggtcctggaaaaccccaacccaaaattaggggttgggggttggaaaaacacaattttgacatttggggaaaggggcccccccgaattgttggtgggccccaaaattgcaa

SEQ ID NO: 14207 - DNA, 221 bp, Glycine max
  Coding DNA Sequence Number=SeqID_4428
tttttcggacattgccataaaggctaagcaccatttaaatgataatgagcaccgaaccattcacaagaacttggacattgtttccaacatcaagagcactagctcaacaaacactgacagagatctgccttttcttaagccactaataattctacgatccgaatccccctcccctgatcactcgaatcgccaatcatctaaaggcctaacccgtgccgtgg

SEQ ID NO: 14208 - DNA, 588 bp, Glycine max
  misc_feature (36)..(36): n is a, c, g, or t
  misc_feature (388)..(388): n is a, c, g, or t
  Coding DNA Sequence Number=SeqID_4429
gagccctgattatgttatgtcgtggggagcgggcgnctcgattatgactcagcgaaccgcgttcagcctgcatatacatgcgggtatcttctacatatggcgtcgcaccgatcgtaccgatgagcattggctcaatgtgaataatgcacacctgatactgtggtgtgatctctctctcacgtcgtacgactccgcgccgccgatgtagtgaatatattatcgacttcatcgcggagggagtagttatatagtcgagtcgcgcctctccttgcctcacttctgcgtcgcacgggagcgccggaaacgcgacgctgctctgccctgcctttcttgttgtgctccaccagacgggcgatgtcgacacgactattcgttgtgtagagcgctnatcgtactgacatgctgcttattctacgcgccgcaacatagggccggcccgcagaagtattaacgtccgcgcgctctatatctactaactaatatattgtatgaatcatatcaggggagcaacgcctgctgtctgcgtgtctctctgtagtatgaaaagaaggagatatagtatcgtgtgttatatatcagcgcgcgcgt

SEQ ID NO: 14209 - DNA, 512 bp, Glycine max
  Coding DNA Sequence Number=SeqID_4430
ggatataatatttgtcaacacatagaactatttcagttggttaataaaataagatcttgctaaatgcgtgaaagataaatgaaagactaaactgattaactgcatggtatcaagagatgatacataatcccatctatcaattggtttgaagcttgtaaaagctcgtgttttaatggacccattcattgtgtgtactatatgtagagaagaagaatgagagggttttgacagaatgctacaccacattacatgtctctgagtgcaatttctcatgtcagaactcacctattatcaaagtgaaagagtgaagcttttctcaagaagaaactcatgttcccagaatggcttcccctccttccccacccccatgtcgctttgctgctctctctccattttcttgtacaaatttctcaatatttatttgtttttctatgttattttctgagaggaaaaaaaaatgcatactggtcttgtaaatcaagtctgctttacatattgccacattttaaata

SEQ ID NO: 14210 - DNA, 491 bp, Glycine max
  Coding DNA Sequence Number=SeqID_4431
acatatctgctcaagccgtccaaaatgtcgaagcgaggacgtggaggtacgtctggtaacaagttcaggatgtcgcttggtctccccgtggcggcgaccgtgaactgcgccgacaacactggcgccaagaacctctacatcatttccgtgaaaggaatcaagggtcgtctcaacagattaccttctgcttgcgtcggagacatggtgatggctacggtgaagaaagggaagcctgatctaaggaaaaaggttatgccagctgtcatcgttaggcagaggaagccctggcgccgaaaggatggtgttttcatgtacttcgaagataatgctggagtcattgtgaaccccaagggagaaatgaaaggttctgcgatcactggtcccattggtaaagagtgtgctgatctttggccaaggattgcaagtgctgccaatgccattgtctgaagacaagattaatcaatcacttgcgtttgattatctttcaatac

SEQ ID NO: 14211 - DNA, 473 bp, Glycine max
  misc_feature (115)..(115): n is a, c, g, or t
  misc_feature (152)..(152): n is a, c, g, or t
  misc_feature (428)..(428): n is a, c, g, or t
  misc_feature (436)..(436): n is a, c, g, or t
  misc_feature (438)..(438): n is a, c, g, or t
  Coding DNA Sequence Number=SeqID_4432
acattctactccctacattactgctcgtcataccgtagcgatctctctactacgtttaactctctaccgcgtgttctcgcacgcacgtggtgagcacgcgttcgcaagacggtantaggcgtgacacaaatacatcagatcatagtcagagnaagaagacaggaagacgacaaaatggcagaaagtagaagagatatgagatgatggaatgaaatcctggctatgtacactgttctctgtgtcacatacactcagtagaaacatcgctgaggagacgccgcggtacgtacacatcacctgtcgtgctttatagtgtcgacactagagttatactcactatagcgtgtcagagagaatatcataaatcatgaagaacatatatcacacaacacaccactcagacgctagagcgtcctcagggagattangtagtgangngtatgtcctagttgccactgtaacatcctttgtat

SEQ ID NO: 14212 - DNA, 491 bp, Glycine max
  Coding DNA Sequence Number=SeqID_4433
atacccaaaatgtttcaggatcctattgttggccttcccagctctcgagttcatattgattctaaaaaatcagttgtcagagttgagggtcacagaggagcaggttaccttgagcctgaaaactccataaaggcattcaagaaagctattgaacttggtcttgattgtgttgaatttgatgtctggctcactaaagatgatgtccccgttgtcttacatggatatcccggaggcattatggagtttgctaatggtgtcagagaagcaatcagtcaaattcattccgatgatatgagaaaattcacactttataatggagaaacagtaccaacattggctgaagtcatggacacttgcaaagacagaatatgcttgaatattgagatcaaagaagtcagagaagaagtaatggaaaaagtcttggatttaattcaagaaagaaacatgtttgatcaagtcactttcagctcattcaaccattatctccgaga

SEQ ID NO: 14213 - DNA, 495 bp, Glycine max
  misc_feature (401)..(401): n is a, c, g, or t
  Coding DNA Sequence Number=SeqID_4434
gggagacagctactgctgccagtattgacaaatctgcgcctctggagattccaactcaagttaagcgaacagcggaaacagagagtgttgaaaccatggcaaagaagccacggttagaagaacttcaagtacagcgggtgaaagagcagcttgctgctcgtttggatgctcccaaggaagcatcagtcaccattgataacatcaaatccttgtctgaggctatgtcagtggaaaaaattgcagcaattaaagcaaagcgccttgcaaaaaaacgaacaactatcaagggcactgatgaacctggcttgggttccgatcttagaggtatgcttgattttgatgtagatgtaaccaaagatattttgtcaagagaaagacagtggagaaccagaacaacaatnttacagagcactggcaagatttttgcaaagaacattttagcaatcctgtcatctatcaaagctcgtgaggagggcagaaacagaccaccacagc

SEQ ID NO: 14214 - DNA, 573 bp, Glycine max
  misc_feature (55)..(55): n is a, c, g, or t
  misc_feature (94)..(94): n is a, c, g, or t
  misc_feature (96)..(96): n is a, c, g, or t
  misc_feature (124)..(124): n is a, c, g, or t
  misc_feature (131)..(131): n is a, c, g, or t
  misc_feature (145)..(145): n is a, c, g, or t
  misc_feature (168)..(168): n is a, c, g, or t
  misc_feature (175)..(175): n is a, c, g, or t
  misc_feature (184)..(184): n is a, c, g, or t
  misc_feature (197)..(197): n is a, c, g, or t
  misc_feature (216)..(216): n is a, c, g, or t
  misc_feature (235)..(235): n is a, c, g, or t
  misc_feature (240)..(240): n is a, c, g, or t
  misc_feature (243)..(243): n is a, c, g, or t
  misc_feature (257)..(257): n is a, c, g, or t
  misc_feature (272)..(272): n is a, c, g, or t
  misc_feature (284)..(285): n is a, c, g, or t
  misc_feature (307)..(307): n is a, c, g, or t
  misc_feature (320)..(321): n is a, c, g, or t
  misc_feature (323)..(323): n is a, c, g, or t
  misc_feature (328)..(328): n is a, c, g, or t
  misc_feature (333)..(333): n is a, c, g, or t
  misc_feature (352)..(352): n is a, c, g, or t
  misc_feature (357)..(357): n is a, c, g, or t
  misc_feature (371)..(371): n is a, c, g, or t
  misc_feature (383)..(383): n is a, c, g, or t
  misc_feature (388)..(388): n is a, c, g, or t
  misc_feature (392)..(392): n is a, c, g, or t
  misc_feature (398)..(398): n is a, c, g, or t
  misc_feature (407)..(407): n is a, c, g, or t
  misc_feature (422)..(422): n is a, c, g, or t
  misc_feature (435)..(435): n is a, c, g, or t
  misc_feature (473)..(474): n is a, c, g, or t
  misc_feature (510)..(511): n is a, c, g, or t
  misc_feature (515)..(515): n is a, c, g, or t
  Coding DNA Sequence Number=SeqID_4435
gatgctattatgacatgatctcactaaacggcagcatcgagtcactacaacaacncacacatcaccaacgatcggcgcgagtaagattatactntntcgattatagagttaccactcgcactgnccatacnagtatactctacgncagcgagtcgatctgtaacacgngcgacgnttatatacntctgacatgaatnagcgaacttagtacgatantcttacgtgattactcacnatatnacnagatacgtattatntacgatacacactgnccacacactganncatattacacgctcactcgatntacgcaacgtctnncntcacnctcgnctaagcaacacatcatcancaacncatcacagcgaacncagacatgtatnaaacntacntgacanacagcgcanacgcgagcatcacanattatatctacgnacctcaacgcacgcaatcatgctatcgtggacacaatnncgtgatgaagaaagcgcgacgaccctaagtcgcagnnctgnagacaactagactcaccgagagagacactacatatcgcgtactcactacatactaaga

SEQ ID NO: 14215 - DNA, 157 bp, Glycine max
  Coding DNA Sequence Number=SeqID_4436
tcaaatcgaatttaactctgaaaatgaaggaaagttccactcattccacccagttgccaccatgctaatttacctgaccaaggcccatctggttccaccgacttcgccaggggttaatgcactgtcaaagctgagagctatgctagaaaacattcta

SEQ ID NO: 14216 - DNA, 428 bp, Glycine max
  misc_feature (192)..(192): n is a, c, g, or t
  misc_feature (224)..(224): n is a, c, g, or t
  misc_feature (249)..(249): n is a, c, g, or t
  misc_feature (306)..(306): n is a, c, g, or t
  misc_feature (335)..(335): n is a, c, g, or t
  Coding DNA Sequence Number=SeqID_4437
cttctcttcactcttatactagctactatagacgtatcacctatacgacatatgatgtacacggatcgtgtgttgaatgtgacaatatactgtttatcggttagagatgtgatgggtgagtgtagggagtgagatgatggaaggctaggtgcgcactgtgagccctgaccacgcctacatctattctccatncaagtacattataacaacagaaagagacacanaagagtaaatatagtgtgtataatntatataatagattcgcgaaacacacatcataaccatcgccgcagccctaactgcacncggagcggccacacgaagtccgtggaggnttgagcaacagctctcgtgcttatcaacgatcacgtctatgcgtactcactgcaacaataccacccactaccgcttccgtgcgtctggtgcga

SEQ ID NO: 14217 - DNA, 545 bp, Glycine max
  Coding DNA Sequence Number=SeqID_4438
gaaatcttttgttcatgagactgttatttcaagtgatgaagataccgcaaatttcttagctgactatcaaccaackttcttgaattctaaatttgcmgaacaatctgaatttcttggccaaattctgaagaaagatggtcccattaagctcatcagtaatccattcaacattgaaaaaaagcaaatcttcacaaaaagagcacgtaaaaatagcttcttggctgctcaagaatccgaaaataaagcattcccctttaaagttctcaaagcctctaagatcaagagcagagatagtcttttaagaactttgaagaataacaagagacccttccttatctgtgatgaagatgatgaacaacctgaagaagatgagtttatgatggcttttgttcaacccaaatttatcaagaaaaagagctatcgtagtgatgctattgaggaaagcgattatatttgtcatactttacgaaatcttccagtcgaaaaaatatcgaaaaaattgaaaacagaaacaattgtctaaatcagtcttagttggcgttttt

SEQ ID NO: 14218 - DNA, 377 bp, Glycine max
  Coding DNA Sequence Number=SeqID_4439
gggaatcaatcgaactatcaaatgaggacagtgacttgactctctctctctatccttttccgccgttcctaaccctacaagcttcgtctcgtaaagaaaattccaaagctcaacagagaaaatgaggacagtgctttcgcgcttgagccggggggcgccttccatttccaggctcaatgccacggcagtgtcaatcagcgggagaaatctctgcacagattctaacaaagttgctcaaccctttaaagttgaagaagccgagactgtaaatgtgcctccaccacccacggaaaagttgcttgtgttgggaggcaatggggttgttggatcacacatctggagagaacccctacatccgtggcttgtctgttgcgagt

SEQ ID NO: 14219 - DNA, 492 bp, Glycine max
  misc_feature (109)..(109): n is a, c, g, or t
  misc_feature (462)..(462): n is a, c, g, or t
  Coding DNA Sequence Number=SeqID_4440
taatagacaactctgtgtgcccacccaccctcctgtgttgttggtggtttattcttgagtggtttaatgttgcgatagagttcacaatataaatactacgacatatatncgatagacaaggattatgtctgacaagactccgacttatcatactcctcacataatatacgcatcatgatctgtaatgaccacctactactcacaacatctggagcatcatatgcatctgccgtatgtacagactcaatacgttaggtcgaccgttatttcatcaccgtacacactagggatgcgatggtgtgtatagtggcttcgcgcaatccagccgcgttactcacttgatggcatctcgctctatcgctgtcctctacacatgcgtacttcagggagtgaagacggcgttgcgtatcgcagtgtagagctgaggcgcgtggcgacacgtgacggtatagacactgagantcacacgcatctcaccgtctactaaattat

SEQ ID NO: 14220 - DNA, 559 bp, Glycine max
  Coding DNA Sequence Number=SeqID_4441
tgaaacccctctgatttgggcatgccatatgatacctttgcttaaccataattaaacgctagcgccgcactactgacgttaaaacacttacctgattcatttgatgagcactaacaaccttagcacactatatatacgactgcatagctcttgggggcttcaaaatatcatttagtgtctttcctgtgagcaccatgctcatgcaaggtgttcgtctacttcacttgctgctgcgatgttgctctctacatcatcagtttccattactgattacccttcactcgctcaaagaatcaaagatttgcctaacgacctgcctggaaccaacatcaagaaacatgcttctcagatcatagtgaggactccacttggttatcttagccaaggcactgctggaggtggggcttatgttgctgtcaagcaagagatgatgcggcctactgccatcatcaaagacagaccaccatatgcaacgatcacagatgctgatgaaaagtatctgataactcctggaaagacaactctgattgagcccacggtcagcactatgggtatcatc

SEQ ID NO: 14221 - DNA, 538 bp, Glycine max
  Coding DNA Sequence Number=SeqID_4442
ggacagctcgccaagatagcaggatgctatgtggttggaagtgccggctccgatgagaaggtgaatctcttgaagagcaagatgggcttcgacgacgcgttcaactacaagttggagggggacgacctcggcgcggcgctcgggcggcgcctcccgggcggcatcaacgtctacttcgacaacgtgggcggcgcgacgctggacgcggcgctgctgcggatgcggccgggcggccgggtggtggcgtgcgggatgatctcgcagtacaacctgctggagcaccagggggtgcgcaacctgtggtgcatcatcccaaagcgcgtccgggtggagggcttctcctgcatggactaccaccacctgtatcccaggttcgaggaggaaatggccggctatatcaaggcagggaaggtgaccgtcgtggaggacgtcgtccgagggattgagagggcgcctgaggctctgctgggcctgttttctgggagaaatgttggcaagctgctggttgctcttgcatgagtcatgagtgtgagtccat

SEQ ID NO: 14222 - DNA, 365 bp, Glycine max
  misc_feature (97)..(97): n is a, c, g, or t
  misc_feature (190)..(190): n is a, c, g, or t
  misc_feature (292)..(292): n is a, c, g, or t
  misc_feature (340)..(340): n is a, c, g, or t
  Coding DNA Sequence Number=SeqID_4443
ttcttggcaccacggctctgcttcttcccctgcctacagcgcgggactgggtccggagaggagatttctttatcccgtacggagtgcgcatgcggcngagggaaggcaaggacggtcgctttagcgccgtcctcgttgcggcggttcttcggttgttggcagcggcggcataggagacggggaggcgctnatgtctgtcaaggcgggcttcggcaacgccgctaacacgctcgtcgactgggacggcggccgcgaccactgcgcctggcaggggtcgtcgcctgtgacaccnactccttcgccgtccttcgactgatgtggagattattgactaaagaangggatcttcaggctttcgacgacat

SEQ ID NO: 14223 - DNA, 517 bp, Glycine max
  misc_feature (177)..(177): n is a, c, g, or t
  misc_feature (293)..(293): n is a, c, g, or t
  misc_feature (368)..(368): n is a, c, g, or t
  misc_feature (440)..(440): n is a, c, g, or t
  misc_feature (492)..(492): n is a, c, g, or t
  Coding DNA Sequence Number=SeqID_4444
atttgtcttgtgtactatcttggtatattttgtagtatttatctatgttgttctctcttctgttgtgcgtcgttgctgctgtagttgtgtggtagtacacggctcctacgagacagagattaggagacagaacgaacacacacaccatcaaacgagcagtaaagacagcccgcgccncgcaaagctgcgcacgacactgcgcagtgcgacaacacaatcgcaacgcatatatctatgtcacacaattccccacacacacgacggatgaagaatagagaagtctcagcgcgcantgctcacatggcagatggacacgacgagagatgtcgggcgcggcagcaggtgttattatgactatctacatcttnttacgtggcggctccatgatatgtagacagatacagcctgcggatgcacagagagatgaagaatcaatttcnagtaagacagaagacgcgtgcctcttgcccgctcctctgtgtgttttcgcgnccggtatttgcgtcttcgcgtggtg

SEQ ID NO: 14224 - DNA, 557 bp, Glycine max
  misc_feature (47)..(47): n is a, c, g, or t
  misc_feature (52)..(52): n is a, c, g, or t
  misc_feature (57)..(57): n is a, c, g, or t
  misc_feature (65)..(65): n is a, c, g, or t
  misc_feature (95)..(95): n is a, c, g, or t
  misc_feature (105)..(105): n is a, c, g, or t
  misc_feature (154)..(154): n is a, c, g, or t
  misc_feature (172)..(172): n is a, c, g, or t
  misc_feature (184)..(184): n is a, c, g, or t
  misc_feature (210)..(210): n is a, c, g, or t
  misc_feature (214)..(214): n is a, c, g, or t
  misc_feature (226)..(226): n is a, c, g, or t
  misc_feature (234)..(234): n is a, c, g, or t
  misc_feature (264)..(265): n is a, c, g, or t
  misc_feature (279)..(279): n is a, c, g, or t
  misc_feature (281)..(281): n is a, c, g, or t
  misc_feature (304)..(304): n is a, c, g, or t
  misc_feature (330)..(330): n is a, c, g, or t
  misc_feature (332)..(332): n is a, c, g, or t
  misc_feature (334)..(334): n is a, c, g, or t
  misc_feature (336)..(336): n is a, c, g, or t
  misc_feature (355)..(355): n is a, c, g, or t
  misc_feature (362)..(362): n is a, c, g, or t
  misc_feature (402)..(402): n is a, c, g, or t
  misc_feature (472)..(472): n is a, c, g, or t
  misc_feature (485)..(485): n is a, c, g, or t
  misc_feature (500)..(501): n is a, c, g, or t
  Coding DNA Sequence Number=SeqID_4445
agatacgtctgcatcacggcggcgactcgtacaccacacagcatcangatcntaaantcaagcangtagcgtgtcgatttatcgtatatatgatntatggactangatctatactactgtctcatcatttgactgtgtattgacgcagctgatngctcgactgcgatcgtantcattcagacanctacactatctccatatcctaatccncgantgtgatcgctcnacatagancaccgtcgacatattatcacactcatgatnntagagctcgacatncnatactatatatagtgcgcgatcnacttatagcgcgtcagtggtgtctcnantngntgatgagtgaatttgcganatactancctgctatgacgcgtagtatcgactattacgacgacgganacacgacgcttcggcgagacacactactgcacgactgtataagcactaaatcgtcatcatgacgcgtcancgcggtgcgtgtncggtgtgattcgtanngcttgttcggcacaaggattgccggcgtgctaacagactgcgagagctgcgcggtt

SEQ ID NO: 14225 - DNA, 586 bp, Glycine max
  misc_feature (139)..(139): n is a, c, g, or t
  misc_feature (262)..(262): n is a, c, g, or t
  misc_feature (272)..(272): n is a, c, g, or t
  misc_feature (274)..(274): n is a, c, g, or t
  misc_feature (452)..(452): n is a, c, g, or t
  misc_feature (548)..(548): n is a, c, g, or t
  Coding DNA Sequence Number=SeqID_4446
agcgctgctacctcacgtgatgtggcgcgcggcccggcgatgtgtatctttgagtacttcgtttcggagggcgaagtcgttctactatctgattatccagtagctctctcatatatactccatatatatctcagtgcgntgtcgtggagaagatctgcaacagagggccgttgcgcctatttatactggctgtgtgacagcttatatattatcttaacacgcattcgtctacgtctacatccaatctcaattcacacctgancacacatcgntncactcggatctaccccgcgtcgcgagcgctcttagcgtgctcatgcgctcgagcgcatgatgacaatgtgatagactcgtactgaaaatactgatacccacagtatgccacaccacacatacacgactatactataatacaaggatgcactccaactatattcgtatcacacctcatnttatacaacatacctctccctcacctctcgcacctgtcgtcgcggcctcctcacacctctacacctctcgctcttatctcgtcttgtatctgcgtntaagtcgcgtagagatgctaggcgtagactgatactgt

SEQ ID NO: 14226 - DNA, 594 bp, Glycine max
  Coding DNA Sequence Number=SeqID_4447
atggtgtttcatgcttctatgctctccaccccgaatggcaaactcgcataccgactagaactcgctgaactttcctttaatgtataaccacatgcacattctgtccctatattgaaaacggtggcaatggtgattaaagaagtgctacgtttataccccccaggagcctttgtttcaagggaggcatacgaagatatccaaattggaaacctcaatgttcccaaaggcgtttgtttatggactctgatcccaacactgcacagagatcttgatatttgggggccagatgcaaatgagtttaaaccagaaaggttcagtggaggtgtctccaaggcttgcaagtttccacatgcttatgtgccatttggattgggtactcgcttgtgcttgggaaagaactttgccatggttcaattgaagaatgctttcaaatagagactatcacatagcagctctttgctccgagaataaaaggttgctgttcattgtcctctagagagcctgatcttataccgttgtggacaacacattatgttcttaacttttgtcaagttgtgtattgttcagggtccccaaaatacacgtgacaccata

SEQ ID NO: 14227 - DNA, 569 bp, Glycine max
  misc_feature (49)..(49): n is a, c, g, or t
  misc_feature (60)..(60): n is a, c, g, or t
  misc_feature (113)..(113): n is a, c, g, or t
  misc_feature (183)..(183): n is a, c, g, or t
  misc_feature (186)..(186): n is a, c, g, or t
  misc_feature (196)..(196): n is a, c, g, or t
  misc_feature (198)..(198): n is a, c, g, or t
  misc_feature (213)..(213): n is a, c, g, or t
  misc_feature (215)..(215): n is a, c, g, or t
  misc_feature (229)..(229): n is a, c, g, or t
  misc_feature (231)..(232): n is a, c, g, or t
  misc_feature (235)..(235): n is a, c, g, or t
  misc_feature (237)..(237): n is a, c, g, or t
  misc_feature (239)..(240): n is a, c, g, or t
  misc_feature (248)..(248): n is a, c, g, or t
  misc_feature (298)..(298): n is a, c, g, or t
  misc_feature (314)..(314): n is a, c, g, or t
  misc_feature (333)..(334): n is a, c, g, or t
  misc_feature (354)..(354): n is a, c, g, or t
  misc_feature (398)..(398): n is a, c, g, or t
  misc_feature (468)..(468): n is a, c, g, or t
  misc_feature (476)..(477): n is a, c, g, or t
  misc_feature (509)..(509): n is a, c, g, or t
  misc_feature (530)..(530): n is a, c, g, or t
  misc_feature (532)..(534): n is a, c, g, or t
  Coding DNA Sequence Number=SeqID_4448
gccgtccttgatctcatgcagtgctgcgtcatcgttaatactctacatnatgcgagtcgngcgtcgtgccgtgcgtcaattctgtttgccatatacttacctagagaacatanatgtgattatgttataacattacgatacacccagagatatagtgactgagcagaacatctatctctaatntcncgatactagnangagtgctcggtgtgntntgctctgtacagcntnnacnanannggcgctcnactctacgatgtgcctctgagagcgagctgagcgtcgcggcagaacacangacactatatgacatngagcacaggccagagcacnncacgacagatatgagagatntaatagttataatatctgcacctaggcctaagacacgcaccganagtggaggcagtaacgccgacttatcaagtttcacaatcagggaagcagcggtagccgcggagcgcaagncagcgtgnncgggcagtggcaacgctctactccgagagctntatattagtagaggatagtantnnngtggatcagctcacgcacgacctttaagccgatat

SEQ ID NO: 14228 - DNA, 509 bp, Glycine max
  misc_feature (112)..(112): n is a, c, g, or t
  misc_feature (429)..(429): n is a, c, g, or t
  misc_feature (458)..(458): n is a, c, g, or t
  Coding DNA Sequence Number=SeqID_4449
agcccgcgctacacgatatgagtggcgtatagctcgtgagcgatgaagctggatagctgatgagacgtgagtatgacggcgcacgtgtgagtgcgcgctatgcgtcgccgtntcttccctcgctgcgcttgcgctcatggatagtagtgagaagagatgcgtatggtaagcgtatgatacgatggtggattatgtcattgaggtcatgagcacactatcacataatttcacatatgatcatgtatattactagtgatctagctaacagaatcacctctctcgaacgtatgtaaatatacatagtctctctcaatgcctgctatcctcgcccagcacgcggacctcatcacgcgcgacacgcgcagcacgcccatacactctcgactcgagtgcttagaggactggtgatcgtctacgacgatttgcgtntcatgcattattacttgcgacctcctatnatacgtatatgagtatgctacatcttatgagtcgcatgtcgtcatacgaga

SEQ ID NO: 14229 - DNA, 386 bp, Glycine max
  Coding DNA Sequence Number=SeqID_4450
gcttaagccctggttggatgagtaccatagtttgtcatcttgaaccctggttggatgacaaactatggaacttaagccgtgtaactggtaagatggtggtggttagagtagtagtatagtgaagattatgctatatgatttaattagggacgatgtttctgcgcttgttgtccaacatttgatcatgaaatggtctacgatgagtccgatgtgaaagctgtggctcgagctggggagcgtgtcgtaggtgatccattcaatgggggaatagagcaaggtccatatacagattcaaatcatctcgttaaaatgactgctgtcatcagatcgggtgtggtaagtgtggcaacccttgaaaccggaggatacaagctcgcctacatcga

SEQ ID NO: 14230 - DNA, 286 bp, Glycine max
  Coding DNA Sequence Number=SeqID_4451
attctttcatctgctgaatcctggcattcctcatgacatcttcgacgctgtgaagaggttgacctgccatcgctacaggacatgcgtggaaaacaggttcactgaattatagtccaacgacggtctagacgctgtcccaactgacgtccacgatatggactgctacaccaccttccacttgactgacctccctgaatcgaacgtctctgatatccctgatctcattgatgagcactggaatgcgatgaaggatcttgctgtgaagaccgatatcctttcggaccct

SEQ ID NO: 14231 - DNA, 437 bp, Glycine max
  misc_feature (373)..(373): n is a, c, g, or t
  Coding DNA Sequence Number=SeqID_4452
gtaataagagattatccaccccaacacacgcaccacagaagcgggacagtcacgacatgagtatacaaggatggtggggagaggtagatacgacaaggacgggtgtttggtctgtacagctggtcgtataatgacacatctggttcctgcgatgtgaacttataaacttcatcctttcttcagaggtcgcgatagatacatcttgtatcatagtacgccatgacacgccgtggtggtggccgcttgtttgggcggccacgtatacgcgtattcgtaaaagacgcagggtagcgcgcgcggatgtgagtcgatattccgtggcagtgcattgtgtctttactatgtatggagacaggaggattgtgtgacgagncgcagctataactctgccgccatcacagatacggcgagaatagacagaggtgcgggctctagca

SEQ ID NO: 14232 - DNA, 544 bp, Glycine max
  Coding DNA Sequence Number=SeqID_4453
tcttcgttatcttttctcagactccgcgtcgcatatccgaggtagctcggtgaatcctaactcatcatctcaactcatgccatggatggacttgcgcctgagggatcacagctacgatgctcgacaatatgattctaaaatgagtgacttactttcatctgatggacaggacttcttcacatgctatgacgaggattatgacagcttcgacgctatgggctcgcaggaaaatcttcgtcagggaatttacgcatatggatttgagaagccatctgccagtcgagaaagggctatcagtctcccttctgcaagggacttgatgttattcagcaggatcagcctgtaactgccaagacggctactttcggctctggaattctgcagtgacttgactatagctcgacgcaatgcacgcacttgtatgtagcaccagatcgtgagcttgctcagcatattgagaaggttatgcgagcacttgcagatgatctaggtgtgaacgctcatgcgtgagtgtcaggtatcagcgtgtgtgtatgacatccag

SEQ ID NO: 14233 - DNA, 376 bp, Glycine max
  Coding DNA Sequence Number=SeqID_4454
gtgtttttgcgccatccgcactatttttcacgtcggaggataccccagaagggcgctctgtcgcgtgcaatggatcaaagggcgcaacgtctttgatgcctattgtcgccacgtcactgcagcattggtcctctccatcattggatccacggtctttctcttgctcgtgctcctttctgttcttaaactccattacagaacaggaatttagatctcgatatgatatgatacacgctataatatatatttgtagggttaattaattaattgagggtgttcttgtacgtgtgctcttgcacccgcggaacaggaatttaaaataagccatccgccggctctcccgggtactcgggaactgcgatacataatacgcccc

SEQ ID NO: 14234 - DNA, 568 bp, Glycine max
  misc_feature (183)..(183): n is a, c, g, or t
  misc_feature (336)..(336): n is a, c, g, or t
  misc_feature (359)..(359): n is a, c, g, or t
  misc_feature (478)..(478): n is a, c, g, or t
  misc_feature (480)..(481): n is a, c, g, or t
  misc_feature (485)..(486): n is a, c, g, or t
  misc_feature (497)..(497): n is a, c, g, or t
  misc_feature (501)..(503): n is a, c, g, or t
  Coding DNA Sequence Number=SeqID_4455
gaggtcccacaacgttataaacgcatccacagcacgccgcgagccagaattattgtactgccctctctcatacaacctcgcctctgtgttgttagagcttcaccgcattataataattacataacatcctgcatactcctagcatttatagtcatacatcatttatggtcagcgcgctcactngcactaccaacattagatctggagtaattgagcgctccgtcgatgtagggatagagtgcatagtgacgctggggtgctacgacagctacactgcgcctctcctctctcccactcttcagcacactcgtgtgactcgtctgtcgcagtggtgtnattaggtctctctcgtttatctncacatcccacctctccctagaacgccgtggaggcgaatttaccacacttaatatatttaacaatacccggcgcgcgtcccactcccagctgtgtggagagtcatccgaatatatatatntnncccnnggggggggggnttannnagatataattataaatacactacatatatgtattcatgtatattgtacgttacttctcactctca

SEQ ID NO: 14235 - DNA, 326 bp, Glycine max
  misc_feature (72)..(73): n is a, c, g, or t
  misc_feature (84)..(84): n is a, c, g, or t
  misc_feature (150)..(150): n is a, c, g, or t
  misc_feature (195)..(195): n is a, c, g, or t
  misc_feature (224)..(224): n is a, c, g, or t
  misc_feature (253)..(253): n is a, c, g, or t
  misc_feature (282)..(282): n is a, c, g, or t
  misc_feature (288)..(288): n is a, c, g, or t
  misc_feature (297)..(297): n is a, c, g, or t
  Coding DNA Sequence Number=SeqID_4456
gctagtacttactaaaatcagatgacaggtgtagcttgagagatgctagtcgtatgaggtaggacgacacanngcaggatgatnagtatgtcatctatcctgttatacactgccgttgtgcattgctatacatctctcgtcagtctagtntatatcgtggtgtcgctgtgctttttatgtgtagatacattttgntatatgcttctcgtcgcgtcggctctccntgctcgagcgcttactctgtcgtcctacngccatgagcccctatctggtccgtcgcgngggcgngctccttcnctcatcctgcctgatatgattgtgttaat

SEQ ID NO: 14236 - DNA, 513 bp, Glycine max
  Coding DNA Sequence Number=SeqID_4457
gatctggtggtggacatgactaacttttataatcagtacaagagtattgagccgtggctgaagaggaagaatccagcttctgagcctgggaaggagattctgcagagtaagaaggatagggcgaagcttgatgggatgtatgagtgtattctctgtgcttgttgtagcacttcttgtcctagttattggtggaaccctgagtcttaccttggtcctgccgctttgctacacgccaacaggtggataagcgacagtcgtgatgagtacactaaggaaaggcttgaggctattgacgatgagttcaagctttaccgttgtcatacgatcttgaactgtgctcgtgcgtgtcctaagggtttgaacccgggcaagcagatcgcgcacatcaagcaacttcagcgttgaagtattattgtgcggtcacagttaatgtttgaagctaataaatcttcacgaagtctttgattttggatttattcttgtattttgttgttgccgattattagcacctgt

SEQ ID NO: 14237 - DNA, 371 bp, Glycine max
  misc_feature (56)..(56): n is a, c, g, or t
  misc_feature (211)..(212): n is a, c, g, or t
  misc_feature (218)..(218): n is a, c, g, or t
  misc_feature (225)..(225): n is a, c, g, or t
  misc_feature (230)..(231): n is a, c, g, or t
  misc_feature (235)..(235): n is a, c, g, or t
  misc_feature (237)..(240): n is a, c, g, or t
  misc_feature (243)..(243): n is a, c, g, or t
  misc_feature (246)..(246): n is a, c, g, or t
  misc_feature (279)..(279): n is a, c, g, or t
  misc_feature (305)..(305): n is a, c, g, or t
  misc_feature (312)..(312): n is a, c, g, or t
  misc_feature (329)..(329): n is a, c, g, or t
  misc_feature (335)..(335): n is a, c, g, or t
  Coding DNA Sequence Number=SeqID_4458
atattatctctacttcttatctttgtagtatactagtctatgattatatctgtctntttattatcattcaataatatatatttactatcttcctcccttcttcgcgcgatcctagtataagagagtgacgtatcatgtatgccagcacgtagaacagcgcgctggcgtgtgttggggacgacaaccaagtgcggacacgtgcaatcgcgcnncactcncctccantagtnntatnannnntantancatatgcgtcgttgggtacgacatgcgtacgcncagcgatgttgcgctgtgtgtgggtngggtgtnagtgagtggggtagagncagtgntcatatcacgtgagatgagctagcatctagaatata

SEQ ID NO: 14238 - DNA, 591 bp, Glycine max
  Coding DNA Sequence Number=SeqID_4459
tctgattccgctctagctggagactcttcttgctaccttcagctccacagccgccgcctcgagaaacccccggcgctgacggagccgaaacagccaccgagaattaaggagcctggctcgaagggtcgggttagctccggtttgggttcggttcatgtagctcagagctgtaacggagatgattggtttgggaagtctgaagcttttttgtggagagaacagtcctgattttcaatcgatacaaagtgaaagtactgtggtgtggcgtcatgttcatgggacctagctaagctgttgagaagaactacgagctacctgatgggcaagtgataacaattggttctgagctgttccattgtcctgaggaccaaggttatttaccagccatctatgattcatatggagaatactggtatccatgaaacaactttaactccttaatgaagtgtgatgtagacatcagaaaggatgtgtacggtataacatcgtgaccagtggtggaagcacattttctctgagatcgctaacaatttgagctaagatatcacgtcttggtctacaagcagcatgaagatcatagttgctactcct

SEQ ID NO: 14239 - DNA, 348 bp, Glycine max
  Coding DNA Sequence Number=SeqID_4460
atgcggcacgaggaaaacaatggctgtgccaacaatgtgctttgcattgctttcattatcactttaacgtgggcagttgaagctcgaattccggggatttactctggtggtgcatggcaaagtgctcacaccaccttctacagaggatccaacacttccagcaccatagggggagcatgtagatatagaaacctgtacagccaggggtacagtataaacacgactacattgagcacggcactcttcaacaacaaacttaactacgatacctattggaagataaattgcgcgggcgagaagcggagtaccactccggagtgctgccattttcatgaccgcggccaactt

SEQ ID NO: 14240 - DNA, 311 bp, Glycine max
  misc_feature (166)..(166): n is a, c, g, or t
  misc_feature (178)..(178): n is a, c, g, or t
  misc_feature (189)..(189): n is a, c, g, or t
  misc_feature (198)..(198): n is a, c, g, or t
  misc_feature (213)..(213): n is a, c, g, or t
  misc_feature (227)..(227): n is a, c, g, or t
  misc_feature (242)..(242): n is a, c, g, or t
  misc_feature (268)..(269): n is a, c, g, or t
  Coding DNA Sequence Number=SeqID_4461
gatgggaagcccaccagattttgaagaaaccaaagagcctggcccaaacgttactcccaagaagagcttgagggctactgaaagattttgtcagaaaagcccttagagactgcccaataaaggaagacccattgaaaaattccaggtaaacggtacaagtgaaggntgacaaaacagncataatgacgnactgcaaanagacttttaaggctncatgggaagtgccntgttgttgaggcacnccctcagaaagcagaggctcagtgtnngctgcccctttgcaaagctggaaagggtttaatgctgtggct

SEQ ID NO: 14241 - DNA, 344 bp, Glycine max
  Coding DNA Sequence Number=SeqID_4462
ttctcaacatggagtcatccaaactctcatctctttctctctgtttcattctcatttgcattatcttctttccccaacaatccttctcatgtggctcctgcaaccacaggaagggtggaaaaccctccattaaaccccctgtaactgttcccaagctacccgttcctccagtgactgttcccaagctacccgttcctccagtgactgtccctaagcttccagttcctccggtgacagttccgaagctacctgttcctccagtgaccgtacctaagcttccagttcctccggtgacagtcccaaagctacctgtacctccagtgaccgtcccagaactaccactt

SEQ ID NO: 14242 - DNA, 444 bp, Glycine max
  Coding DNA Sequence Number=SeqID_4463
taacaaacaaactctccgatctgcgatatcacaatggcagtttcatcgcgcgaggactacgtatacatggccaagctctccgagcaagccgagaggtacgaagagatggtcgaattcatggagaagctctccgccgccgcagacggcaccgagctcaccgtcgaggagcgcaacctcctctccgtcgcgtacaaaaacgtgatcggcgcccgccgcgcttcgtggcggatcatctcctcgatcgagcagaaggaagagagccgcggcaacgaggaccgcgtcaagacgatccgcgactacaaggcgaagatcgagtcggagctagcggggatctgcgacgggatcctgaagctgctcgagtctgcgctcgtcccttccgccgcttccgaggattccaaggtcttctacctcaagatgaaaggcgattactataggtacttggct

SEQ ID NO: 14243 - DNA, 424 bp, Glycine max
  Coding DNA Sequence Number=SeqID_4464
gaatcagaacggcagccggcgccaaatgtggcatcagggcttccatagccggtgagcaacaaacttcccagacgaaggcggctcgccgcagaagcggcaccagaggaagaccaccagcgctggctcaggcatacgagaccagagacaagcccatggcatcacacgcagagccagcagaagaaggggccacccagaacgcaagaagaaaaacaacgggggacaaaagacgagcacagccacatgcagacacaggtgggaagggcctattcacaaaagaaaaagacgaggcacgcataaacggggaacaagacaacgctggccacgcaacgaaagaaggcgccacgcacccaccggaaaaaacaatgccaccacgcaacccgcccacgcgaaggacggaagagacagcagggaagaccggcgcgga

SEQ ID NO: 14244 - DNA, 426 bp, Glycine max
  Coding DNA Sequence Number=SeqID_4465
ggcctgataagaatccgtattacgaaccgcctactgcccgcgcggtttaaaactttcgcgactggagaaaaccatgtcgttacccaactaaaatcgcgtttgaaaaaaaactccccttttcccccaggctgctcgtaatttaaaaataggaccccccccccagtttgccctttcccatatagttgccccacccctcgaattgccccacagggggaattggcaacggcgataaacaaattttgcatcaaaatctctcgtcaaaaattttttcgatgaagttcaacgcgtcatttttttccaccccaaacattggggggaagtgtggccctaactcccccccatgaaaagggaaacaaaactacaacccgggattaaggccatgaaccggttgccccccctctttggccacaaacacgttcactttat

SEQ ID NO: 14245 - DNA, 574 bp, Glycine max
  misc_feature (143)..(143): n is a, c, g, or t
  misc_feature (441)..(441): n is a, c, g, or t
  misc_feature (450)..(450): n is a, c, g, or t
  misc_feature (492)..(492): n is a, c, g, or t
  misc_feature (525)..(525): n is a, c, g, or t
  misc_feature (528)..(528): n is a, c, g, or t
  Coding DNA Sequence Number=SeqID_4466
gagcgcgacgctgtctgcgatatcaccgccgcgcctgtatcgtgtgttcgacgggctcatagatctactagtagtataccaccgcaggaaagagagactatctcttcgcatacacttcacatagagaagttcaagagaggcgncgtaagaatgtggggcagcgcagtacagcgatgacgtgcataagaatgaggtcgagtgacgtgtggagacacacgacgcgcgacggcgtgctagaatatatataccaggagagatataattgcgcgcggtagacgggaccagtagaggtggagcggagaggacacgaaacacaggaataatacagaaggataagacggcgactaactgcgcttagtgtaagagagagtagacagtactctatatacataacgaaactgatctacagaccatagtagttgatccgtacatggatacggngagtgcgancgcgatctgacgcgaagagtgctgtgatgcagagacgcgcancgatcacagtccatgcagatgagtacgcactanacnacgcaccacgtgtcacgctatgctagacacactcatacagtatcga

SEQ ID NO: 14246 - DNA, 535 bp, Glycine max
  misc_feature (165)..(165): n is a, c, g, or t
  misc_feature (261)..(261): n is a, c, g, or t
  misc_feature (318)..(318): n is a, c, g, or t
  Coding DNA Sequence Number=SeqID_4467
ccacgtaatgccttgttcattgttagtatttgtatgagttgtatatattgccctcactcaccgtatgtgtgtatgttgaatatgcactgacatataacatttcatgtatatatcacaccacatgatatagaacactcctcagcacagtccattacatcgatttanctattgactgttctcctcctgcgcactgtccctcgcctactacacatcactttaccaataccatgtcacgactcattgcgttatccaagcctgatnccctgtgcatcttctgtgtatacatgcatattattttgctctgactattaacataancttagacagttagtggagcacatagcatgtcaacgtcagtgtggacatcatttgtctatatatactcaacaaacacattcaccacaaacgacacatcataatgtcacacgttcagtctgccgtactctgcttcgttgagcactgactcgatacacgctccacgacacatctcacacgctatgcatcctgtgatgtctatcttgattatctctcctct

SEQ ID NO: 14247 - DNA, 569 bp, Glycine max
  misc_feature (111)..(111): n is a, c, g, or t
  misc_feature (115)..(115): n is a, c, g, or t
  misc_feature (127)..(127): n is a, c, g, or t
  misc_feature (182)..(182): n is a, c, g, or t
  misc_feature (212)..(212): n is a, c, g, or t
  misc_feature (214)..(214): n is a, c, g, or t
  misc_feature (329)..(329): n is a, c, g, or t
  misc_feature (362)..(362): n is a, c, g, or t
  misc_feature (378)..(378): n is a, c, g, or t
  misc_feature (384)..(384): n is a, c, g, or t
  misc_feature (457)..(457): n is a, c, g, or t
  Coding DNA Sequence Number=SeqID_4468
gaggagcaggataagcactacaacaacactaagggataggcaagctgccacacgcgctaacagcctaccgtagcaaagaatcacacagcttcaccagacaccagcacaagngctnactgtggctgcngccgactggcagaccacacgcgacgcgccgcagcagtctaagaagggtactcgcntgaaggtatatgtaatgagtgcactagtgntnctcagtgcgcgtgtagtgaccgtcgttatctagatgtacacatgcgccctctagctatggtcgagttcagtgtcgagtatgagacacgagagacagacgaagactatgatgactnctgattattgtcagttgagaatgataagcaganatatacacagagatantgactntagtctcatttccttgtcgtcactgtgcgcgcgagtaggccgtatccttcgatctatatgagagtatgagtgngtgcgcgggccatctatctctaatgttagagagtggttaactctagctctctagttattaggttagtatggtgaggttgtgagacattgcactcagatggtgacgagcggta

SEQ ID NO: 14248 - DNA, 597 bp, Glycine max
  Coding DNA Sequence Number=SeqID_4469
accatccttgtatgggatccttcgcccactaagattaacctcacttggccctcaactcctaaccagaccataagttctgggtggaagagatgtcagttggataatcggaccttcgtccgtgccccacagccacccaagcagactcagttccgccattttttgacccatctctgtatgcgacgcgctttccaggaggggacatcttcaccgccttccgttcgtagttcctacgatcgtgctgtgtatcgtcgatccttaggcccctgccccagacgctgtcgtaccgcacggagctcacatcggcttgcccggcatctgcctccttttacgacgcctgaatcgttcgcccccgctaactccagactagcgtcgatagtgatccttccactaccttatctgatgcggagtacagagtacgtgaggggaaagatactacccgctgcgcggactttttatgaaataggtatgttgctaaggtaaagagttctagatggcgaattctctgccaggccccggggagatcccaactagttgatagaagccggcccgcacacgcgacggtggagctgcccagatattacctaaacgcagccgcgg

SEQ ID NO: 14249 - DNA, 551 bp, Glycine max
  Coding DNA Sequence Number=SeqID_4470
gcatcacccacaagttcgaaaatatcgataagctcgtctcctatggaaccgaggtcactgccgtggtcaaaaccgggaagatcaagaagctcactggtgtcaaggccaaggagcttcttatttgggtcagtgtcagtgagatctatacagaggagaaagagaagatcacctttaagtcaccaaccacactgtccaggactttccctgtctcagcttttattgtcccagaggaagtggaaccagccaaggaagagcctgctaaggagaagagcagtgaagccaccgaggaggtcaccgaggaagaacctgccaaggaggctgccaaggttgaacctgccaaagaggctgttgccgtcaaggaggcctaaccaagcttatcactgcttctatagtaaaaagagaccaaaatcttttgaagtgtgcttcaacaatttaaaccgacctttgagagttagtgcttctcactgctcttactctcatctattacctaccactcgttgctgcttatttttacctgtaataagatgtcaacatcatcctgttcttacaag

SEQ ID NO: 14250 - DNA, 572 bp, Glycine max
  misc_feature (125)..(125): n is a, c, g, or t
  misc_feature (198)..(198): n is a, c, g, or t
  misc_feature (214)..(214): n is a, c, g, or t
  misc_feature (221)..(221): n is a, c, g, or t
  misc_feature (252)..(252): n is a, c, g, or t
  misc_feature (257)..(257): n is a, c, g, or t
  misc_feature (296)..(296): n is a, c, g, or t
  misc_feature (303)..(303): n is a, c, g, or t
  misc_feature (424)..(424): n is a, c, g, or t
  Coding DNA Sequence Number=SeqID_4471
tactcactgtcactcgtctctatactcatactcgcctatacaccgcatacatcatacgcagactatctatacatcaactgccctgatccactctcgcgtgtcccatcctcacacctctgtgcggnacatctcgcagcatctcgctctcacactctctcgctcactcttaacatactcgtcacgtacaccgctctacanaatcatgcgccaccangattcancaaggactcacagcgacgactacaccaggancgcgnctatatagatgacatagaacaactctacaactactaacnagagatnagatatacatttacgtcacagacgactcactactccacactacactaccgactgtcagagcattgcgtcatgctaaagctactcacgcacgctaggctacgactccaatatattgcgccgncactcatctcatatcgcacactgctctacgtctcgcgtctctcatacccacgctgatgtatatcgtccatcattctctggtcataacgttactgtctcgtctactcactgctctgtctgtccctattacttctcctcattcaatcgct

SEQ ID NO: 14251 - DNA, 466 bp, Glycine max
  Coding DNA Sequence Number=SeqID_4472
agtgcacaagatggtcgcacctcctcgctcctcccgctacccccatagaccgacgacgccgtgctgagctgtatcgccccgtcggcgggccccactccctacagaccactgctacgcactcgactcatgcgataaggtcgccgtgacgccgcaagggtctggggtgtaagtttgatgatagagggcgatgcgcgccacccggccatattgatctccttggtggcgcggagctatagttgattagcagtacaatcacactagaaggatcgtaatcaaatagagactacatgtggaggtggaaaaggggtctgggtgcgcattaatgtagggaatcgggtcgctcttcctaatatctattgtcatactacagtgatggggttggagttgtcgaccgatgtggctcgtggtatgctgcatcacgctctctacaccctacgcgcggagttgaagcgataccaccattttt

SEQ ID NO: 14252 - DNA, 488 bp, Glycine max
  misc_feature (187)..(187): n is a, c, g, or t
  misc_feature (218)..(218): n is a, c, g, or t
  Coding DNA Sequence Number=SeqID_4473
tttcattattatcactcctccactcttcgcgtctcactcccgtgcgcctctccgcgctttcatgtccgtccagtgatatcgcgcgcatacttatatcttgctccgcgctgatgtttggtcttgtgcttggcgttcttctttgtctgttcctctcgtcgtctggggtttcgtggggtgcttgtgcccntcgagcatgtcggcgcgatatgatagatagnaagaccctatcaacatattattataaatatagactaaagtatatatatataagaatatatacactataataataatatattaatatatctcactatcttcaagtattatgttatagataacaaaaaataccgccgagctcggcttcctctcgatatccactatctatcgctagatatgagatcacttcaagagaacatcgcagtggtggggagtgccgaagaggtgcccgcgccacaccccagactacacacgcccactcgagaataacg

SEQ ID NO: 14253 - DNA, 491 bp, Glycine max
  misc_feature (60)..(60): n is a, c, g, or t
  misc_feature (74)..(74): n is a, c, g, or t
  misc_feature (86)..(86): n is a, c, g, or t
  misc_feature (92)..(92): n is a, c, g, or t
  misc_feature (96)..(96): n is a, c, g, or t
  misc_feature (136)..(137): n is a, c, g, or t
  misc_feature (140)..(140): n is a, c, g, or t
  misc_feature (169)..(169): n is a, c, g, or t
  misc_feature (192)..(192): n is a, c, g, or t
  misc_feature (227)..(227): n is a, c, g, or t
  misc_feature (229)..(230): n is a, c, g, or t
  misc_feature (233)..(233): n is a, c, g, or t
  misc_feature (297)..(297): n is a, c, g, or t
  misc_feature (311)..(311): n is a, c, g, or t
  misc_feature (415)..(415): n is a, c, g, or t
  misc_feature (450)..(450): n is a, c, g, or t
  Coding DNA Sequence Number=SeqID_4474
tgtgatcgcactcctgcgcgtcacactccatcacgtctcaatgcgccgctgtgcactacnattcatgcacattntatatgtagttnacgtcncccnggcgcatgctcgtctggcaagagtctaccactaagtgcgnnggntactgacatcttcttctcgtaacagatcntctagtctcaatacgaagcgtanatacgaactattatattaactatcattttaatatnanncanattgactcaacaacacgtactaggcggtcacgcgtatctcgtctcactcacgtatcttcatcgntgatgcgtaaacgnatcattcgataaaacgctttgatagtacatatctgcgagctcgattgtactgtcacgacggatcagctatgacacgctgacgctcgtctccacctactctactntctactgctgatgcactcgtcacgacgcgatacgncttcgccgcatcacatcgacacactacgagcctaactattt

SEQ ID NO: 14254 - DNA, 383 bp, Glycine max
  misc_feature (130)..(130): n is a, c, g, or t
  Coding DNA Sequence Number=SeqID_4475
gtttcgatttatagacctttgccttttgcattttacacaccaacaacgcgcttcactctagtttctcccttttcgattccaaaagatgagtgaagagcagcagcgacctgcgcctcgtctgaacgagagnatcctctcttccttgtccagacgttccgttgctgctcatccttggcatgatcttgagattggacctggagctccccagattttcaatgttgtcgttgagattacaaagggaagcaaagtcaaatatgaacttgacaaaaagactggactcatcaaggttgatcgtattctctactcatcagttgtttacccacacaactatggtttcgttcctcgcacattgtgtgaagacaatgaccctattgatgttttag

SEQ ID NO: 14255 - DNA, 340 bp, Glycine max
  misc_feature (70)..(70): n is a, c, g, or t
  Coding DNA Sequence Number=SeqID_4476
gatccgctcaccctgtaaggccgtaaactaaaccaacttccattgccttttctcgtgcatctatttgagnttatttgttcattctctttaatagccaggagatgaaggccctcgagagggcagttagggcaggcgaaatgaagcagaccttggttacaattgccttcatgggttgtttgaatgggaacggttggccaatggggctccctttcaaaaattaacttccccctgaagggccccccccgcgaagggcgacaccccccaaaggccggggcaacacagggaggggggttttttaaacacccccttcttttctataacaaaaaacaataagcgggcg

SEQ ID NO: 14256 - DNA, 567 bp, Glycine max
  misc_feature (75)..(75): n is a, c, g, or t
  misc_feature (487)..(487): n is a, c, g, or t
  Coding DNA Sequence Number=SeqID_4477
tcggcggcgcgtattgcgctatatagaatccgcgcactacaggccgtatctgaatcgcggtgcagcatcgtcacnacaattcactgacaccaagtaccttgtttttctttcgtccgtcgtattctttaggatcctgatcgtccctacaggtccattgctactgttcgtgctattatatggttggatattgagggggtgcagcgcatacatggagggcgaggtggggctcatataaaaccggcggccgcatccataaatctgttgacagttatgggcgtggtgaaaaatcgtgtgagtttgataatcggggccgtctggcctcgtcggtatcaacactctgcttaggtgtgccaatacacaatgcgtgtgtggtgagtcgtactatattattaatacgaattgggtgttttataaagggggtattagatggaaggaggagaattttttatcgtctacacacctgtactctgatatggataataatcanctccttcacatacttgtctcactcactattccaaccgctcggctcccaccgcacgtcacgcactcacctacatggataat

SEQ ID NO: 14257 - DNA, 485 bp, Glycine max
  misc_feature (130)..(130): n is a, c, g, or t
  misc_feature (148)..(148): n is a, c, g, or t
  misc_feature (383)..(383): n is a, c, g, or t
  Coding DNA Sequence Number=SeqID_4478
gggctcgatgctctgcttatagagtatctttgcggcggcatcgagtccctagcgtcgcttcgcgctctacacacatactaatagggctatgtcagcgaccacagaaaccgatctgcgctgctggtgtttnttatgtcctcatacgcanatacactacaactcgtggtctacctttcggcatgcgcgcgacctcctatacatcgaggttcagcgtctcggcaggcattatacccgctgcgcatgtcttagcgataagtacctcaccgcgagcagattctctacgtatccgcatatcacttagtatcagtgcgtggcgagcgcgtactacagtacatcaacctagctcgcctagtatataggggtcacgcacgatatgagggtgntatcaatttagtgcgttataggggagagcatattgataggcacatccatcgccgccactccacgcagggaaggcgggcgtgaggtagccattagcgataatc

SEQ ID NO: 14258 - DNA, 473 bp, Glycine max
  Coding DNA Sequence Number=SeqID_4479
gtagttctagtcttttacacgtactattgcagaaggggacagggatagagctaggttgtagcacatcaaatttcttgtaaaaaaagtgaagccaaacctaggcaaacaacaaatattctatcacaatttttggttgctgatatagcatctttctcttttgcctatacacgtcaaagtttgtatggtttggcccaataatgtgtctcaatgcaataatttgtcataaattgagctgtaggaagtaggaaggttgaagttttggtctggttcagtttgaaacttgaacatggattgaactaatcttaatctcaagtaattcacctgattgttgaatcattctgcaacactaattatgtttggttgtttcaatttgcgtattgcagtttggcttgacaactcctaaattggattcttttttgaagtttaccttttttgtgctaagtttgctttgctgttcatcatggatttccatt

SEQ ID NO: 14259 - DNA, 552 bp, Glycine max
  misc_feature (40)..(40): n is a, c, g, or t
  misc_feature (92)..(92): n is a, c, g, or t
  misc_feature (104)..(104): n is a, c, g, or t
  misc_feature (139)..(139): n is a, c, g, or t
  misc_feature (142)..(142): n is a, c, g, or t
  misc_feature (176)..(176): n is a, c, g, or t
  misc_feature (195)..(195): n is a, c, g, or t
  misc_feature (234)..(234): n is a, c, g, or t
  misc_feature (330)..(330): n is a, c, g, or t
  misc_feature (409)..(409): n is a, c, g, or t
  misc_feature (423)..(423): n is a, c, g, or t
  Coding DNA Sequence Number=SeqID_4480
acacctgggatctcacaaatctcggacgcgactagtgctnatacgacgccatctcttcctcttgattgacatgctatctaccatgctcatcntctctctctgtnatctctctctacactactactttccgcgtgcgacntcnatccaacgctcgcgcgcggcatcgcacgtcatcncgacccagtcacacatccntacccgtcataccatcatcacccgtatttgggcggcatnagtctatatactctcgcgcgaaattagtacctcatcacttcgcagggaggctcgtgtatcatattcacgtgcaaggatgagaagacacacacacangcgtgatgactactatgcgacacgatggctgtgatctacgagcacgcctctcacacgtgaatcacgtccctctcacacnctacatcgcgacgncgcatctacctccatatccatccacatcctcacatcccacaacctccggttatcacttgcggtgctcatcttactctactacacctcctatcttaaacacacacacctcactacatggcgttggcatat

SEQ ID NO: 14260 - DNA, 463 bp, Glycine max
  misc_feature (237)..(237): n is a, c, g, or t
  misc_feature (332)..(333): n is a, c, g, or t
  misc_feature (336)..(336): n is a, c, g, or t
  misc_feature (338)..(339): n is a, c, g, or t
  misc_feature (342)..(343): n is a, c, g, or t
  misc_feature (356)..(356): n is a, c, g, or t
  misc_feature (380)..(380): n is a, c, g, or t
  misc_feature (397)..(398): n is a, c, g, or t
  Coding DNA Sequence Number=SeqID_4481
agcgcaaggcgcaacaacaacgggcgagaaccacgtcacacgtcaacatgaagcgcgcggcagccgcataacccactagtgtgtgtgatgcctcgcctggtatcttactcagcgtgtgtcatattatatacataccataaccaacaataagatacacgaagaagagagtagccgagacaagtgaggcggcggtggtcgggcggggaggggcggggtggagggttcagttgaacgatntcaccggggagtgtattgttaagtttttacactggttcgttttggattgacagatgtgggatgttagagttaatatatgtgggtgtttctaaaannganannaannagacgcaccaccnaacacctcccgcgcctcccccgcntccaccctcgcatacgnncataaaatataattagaagtatatatagttgttagagatcaccacccgccgacgatagaggaaga

SEQ ID NO: 14261 - DNA, 531 bp, Glycine max
  misc_feature (255)..(255): n is a, c, g, or t
  misc_feature (361)..(361): n is a, c, g, or t
  Coding DNA Sequence Number=SeqID_4482
ttcgcacctgtaacaatataaacgcacaacaaaaagtgctcacgcacctcactcgcgataccactccctcaccttactccccaatcaccaaggtttcaccccacaccactcactctcccaccaccacgcaccccacaaccatccacaccacacaaatatgtgctaatcaagcgccgctatctaaaataaaatcatctctcgtaataaacacaaaaactatacgcaccgccacaaaaacaaatgatttcaccatgntctaacaacatacaagagccctccgatatgttatactcctacacaacacacaaatataacatgccacaaatacatatgcttcccgctaaacacaacattcccactnttataactacacatatctcacaatataacataaaaacaacaacctaatactcacacatagtggtcatacccacaaccgccgcctcctcaactcacaatacatacgtgagaaataccattaccagatatcacatccattctctctatagtatgtacaacagcctcagcaca

SEQ ID NO: 14262 - DNA, 513 bp, Glycine max
  misc_feature (220)..(220): n is a, c, g, or t
  misc_feature (228)..(228): n is a, c, g, or t
  Coding DNA Sequence Number=SeqID_4483
atttgcacgggaatgttatgtctacatatgataatatccgcgatctagtgtttctcaccctattcgctgttgctatcatactcataggtcaccatactctctcggcgcgcgcacgtcgcgcgcactaggctacagcttgcgtcggtagatagtcgtcctcctgtctggcctaatgtgcgcgacattcagctacgcgtgatcgattatcgcacttacgctnaggcgacncgactggagtgatttacgtctcctaccagctcaccgtaccccgtaatacaactattagttcagtatacgagatcatgaacgcacagtaagattattctaccaactaggtggatactagcagtcgctactcctgttgctgtatagaactcgtgcgggtctcagaggaaggccagcagccaagctcatacgtgtgtgcggacttcgtcatagtagtagtacctcgaattagtaagactgttatcagaatctcacaatcgcactgatgcatctgctccgtcatgcaga

SEQ ID NO: 14263 - DNA, 581 bp, Glycine max
  misc_feature (343)..(343): n is a, c, g, or t
  Coding DNA Sequence Number=SeqID_4484
gggcctgcgtctgggagaaccaccaaactgccacctgcgctgccgccacgcgaaatcctacgacgcctgtttcgaacagtgcaaaaaagaacaagaagcaataggaggaagagttgcgctactggtggcggcggcagaggggcaaaagcaaggacaagaagaaagagcaaaaggagcagctgggctcctggcgatgccgaccgagcgcgctgaatgaggagaagaagaagagaagaggaggccagaggccgacgccatatgtactatgttttttctgttttcctatcttacagatgctcttatttctggtgtgagcccgcaaccttgtgcgtgtgctgtactntagatcgccatgatgtgctgctaaaacaccatgaaccgcggcgactaaggccgccatcattttccctttcagaataaaaggagttttaggttttacccatggattgtttacacaaacaaatttcctatcttaccgatgctcttatttcttaatcaagtaacccattgaacagggggatttattaggcgtggaaagaggatgactaaattgttaggaagtccttcacttatccaaagag

SEQ ID NO: 14264 - DNA, 307 bp, Glycine max
  misc_feature (165)..(165): n is a, c, g, or t
  Coding DNA Sequence Number=SeqID_4485
tcaatggctgtggtgctggacttagatgagacacttgttcattctacactggaaccctgtgatgatgcagatttcacttttactggctttttcaattgaaaagagtacacactatatggggaacagaggccttatctccacacattcttgaaaaaagtatcaganatgttggaagtaggaatgtttactaccagccaaatcatatgtgcagagcaactacttgatatatgggagcgctaataaaagattgatgtctggtcgcatatgtcgagatgcggggttttgtgaggatggaactgcgacgaac

SEQ ID NO: 14265 - DNA, 423 bp, Glycine max
  misc_feature (108)..(108): n is a, c, g, or t
  misc_feature (140)..(140): n is a, c, g, or t
  misc_feature (236)..(236): n is a, c, g, or t
  misc_feature (238)..(238): n is a, c, g, or t
  misc_feature (309)..(309): n is a, c, g, or t
  Coding DNA Sequence Number=SeqID_4486
gagtagtagtgtgctggagtggtgtgggagagaggaaggggtaggtggagtgagggttggtgtgagttgagtggtgtattattgttgctcgtggttgaggtgtattanagacggagtatgagttattgtattatgatggntcgagcgcgtatatatagatatacaaggagaggtgagagaagagggaagtaagcagaagagaagagagagcaaatgatgatggtagagagtgaagngngtagcttgatatgtagtgaagatgtgattagtttatgtggttcgtcacatgagataatagttagggtgtangggagaggcagtgaattgttgagcatgggaagagatttataggaggcgatggagaggagaggagatatgagaaggaggatgggagtgctagatatgtggtatatatcgttgttg

SEQ ID NO: 14266 - DNA, 413 bp, Glycine max
  Coding DNA Sequence Number=SeqID_4487
gttgcaatcggttgccatgatatcaacgaatcaaacaaattggcaacaaaatttgaaattccaaaagcttatggctcatacttggaattggccaaagatccaaatgttgagattgcatacgtcggcacactgaatccatggcattacgaagtgtccgtgttgatgttggagcatggcaaacacgttttgtgcgaaaaaccattgtgtatgaactcaacgcaagccgaaaaattggttgcactggccaaggagaagggcgttttcttcatggaaggcatttgggttcgattcttcccaagctatcaacacgttcgcaaagaaatccgaagcggtgcactcggtgatattgtatcgatcgtatcggaatttggaatcgaagattatgaaagtggccgcttcaaaaaagcatgggc

SEQ ID NO: 14267 - DNA, 453 bp, Glycine max
  Coding DNA Sequence Number=SeqID_4488
tccaaaaccattccttcaaagctctctcataccaatcaaccaacgatggcgtttcctaaagttttcttcgacatgaccgtcgacggcaagcccgcgggaaggatcgtgatggagctgtacaccgacaagactcccaagactgctgagaacttcagagctctctgcacgggtgagaagggtgtcgggagcaaaggcaagcctcttcacttcaaggggtcttccttccaccgcgtgatccctaacttcatgtgccagggaggagatttcacggccgggaacgggacgggaggcgagtccatctacggggagaagttcgccgacgagaatttcgagaggaagcacaccggtcctgggatcctctccatggccaacgctggtcccaacaccaacgggtcgcagttctttatctgcactgttaagacagattggcttgatggtaagcacgtggtgttc

SEQ ID NO: 14268 - DNA, 469 bp, Glycine max
  Coding DNA Sequence Number=SeqID_4489
tttcccacaaatctctcctgaaaaccctaaatcaaaagtcgagaacaatggcgtcgttcgctcgccgagccatgagcctagctcagattccatctgcacgtgcccccgcctctgtctgtcagcgtcgtggtctcgctggcgccgctgatcaccatggatctaccaaggttgacttctggaaacagcccacgaacccaggaaactggaaagaggagcattttgtgcttatttcgctctctggctggggcatgcttttctacggtggatacaagctcttcaccggcggcaaaggagagaagcctgtcgaggctgcacaatgaatttatcactggggaaaagagtcttcttctcgtgcatttactttcactttcagcaccttgtgactggtctttttatcaaagccagcaattacttgtttgtttttctttgacaataatatgcatcatttaatcaccttttgagatctcaa

SEQ ID NO: 14269 - DNA, 588 bp, Glycine max
  misc_feature (135)..(135): n is a, c, g, or t
  misc_feature (137)..(137): n is a, c, g, or t
  misc_feature (175)..(175): n is a, c, g, or t
  misc_feature (236)..(236): n is a, c, g, or t
  misc_feature (495)..(495): n is a, c, g, or t
  Coding DNA Sequence Number=SeqID_4490
atatactaactcatcactacctcgtgagcagacaccagtcgccgcagtggtggagtataaagctatactgtgtataccataaagttaacactgctatacacgagcgggactgggattaatatactgacgacgatnantcgcgcgacacacccataccacgactacgtctcaacancacgtccgatcgcgccgccggcggctagcttgacctgacacactgacgcatgagtacaacncgacgcgcgaccatagacagatctaaagcgttcatgtagcacggtattcaagcggccgcgctaataaaaagatgagaataaatatgcgtataaccactctgtgctgcgtggaaaagaatcagccagtcggctaaccaagccggacagaggactacagaacaatctacacgagaagcaggaggagcttacgacgagccactaaggacaaaacatagcgtgcacgtaacactgttctcactactattgtcacactaatatntccatatacttatcgctgtgcgtattatacagcggtgcgagacagacacacgggcagggcgacacacgacgcgcgcgcgcgtagaacataggt

SEQ ID NO: 14270 - DNA, 528 bp, Glycine max
  Coding DNA Sequence Number=SeqID_4491
agcacggcaaggctggtccattcaactaccaccgtgccatcaagagaggtgcccgcatcccatggcgccgtattcctggtatgaagatctagatgcccaggcatcgccgccaccgacggtgtcagcggtggcagtctcgtcgttgcaagatgaccgaggcttcactcaaggcgaggagtctttcaccatctcctcctcgtctttcatgcgcaacgtagcgacatccgcgaacgctctacgccacgactattctctgcacgcccgtcgcatttaattcacgacaggcagttaatctgcatgttctttacgccttgacgccttcgtcttggtgtcttggtgactgcagtctttcttgcacgatgcatccaacaatacaaccaatacattcgtcgctcgagcagcactcttcagcacgaaactcacccgctcgcgcacattgcgacgactcttccagtgtccaagccacagaaactggccctcaccgctgcctttgctggccctgcatacccactgcaggtcggccatagg

SEQ ID NO: 14271 - DNA, 358 bp, Glycine max
  Coding DNA Sequence Number=SeqID_4492
ctcagcggtcttcaccctgttgtaagccaccccgggcaatgcgctcttccgcagccttgatcccagactactttgtgacaaccatggttctaaccaatatgtcgctacagtgcgagttcatgaccttcaacttcgccatgcaggccatcgatcaggtcgtcaactcggccgccaagaccctctacatgtctggcggtatccagccttgcaacatcaccttccgtggtcccaacggcttcgctgccggtgtcgccgctcagcactctcaggactactctgcctggtacggcagcgttccaggactcaaggtcgtctccccatggagtgctgaggatgccaagggtttctgaagaccgcc

SEQ ID NO: 14272 - DNA, 588 bp, Glycine max
  misc_feature (245)..(245): n is a, c, g, or t
  misc_feature (263)..(263): n is a, c, g, or t
  misc_feature (294)..(294): n is a, c, g, or t
  misc_feature (379)..(379): n is a, c, g, or t
  misc_feature (445)..(445): n is a, c, g, or t
  misc_feature (506)..(506): n is a, c, g, or t
  misc_feature (531)..(531): n is a, c, g, or t
  misc_feature (537)..(538): n is a, c, g, or t
  Coding DNA Sequence Number=SeqID_4493
aacatgatgtcggtctggtctataatactgccgacaagatgtgcactgaggtcgtacatcctctcgcaccacacacccttcaccatattactatcactcgccgcgacttgaaatagcgctccgtctgatgatattgtcgatgtatataaatatagcgcgcgccgcgtgacatatatatacgtccggcgtctgcggatatacaagacggtctgagtaataatattcgcggctacccacaagctcgncgcgcgggatatttacanaaaaacactatatatagtggtgtatcaaaanatcatacgtcgcgcgatactacagcgtatctcgtgtaatacaaatatagtgacggcgccgtgcggtcggagtggattaagtgcancaacaaactatcttcatagaccagtacgtcccgtgctctggacatgcgcggcgtatacatatatgngcagaagtgataatagtgtgatgctcgcgcgcacgcgcgcgctgtaaattattatgtatanatgtgtctgactgtgacgcgacggngagcgnncaccggaatgatgaatattacgctcgtttgcgatatacgctacgcgcagt

SEQ ID NO: 14273 - DNA, 230 bp, Glycine max
  Coding DNA Sequence Number=SeqID_4494
tgcgttttaatgaaggcgcttctgtgaaggccgcatggccatgccatggctcatgctaccaaacggttccctctatctaataaacactggctatgagaagagcgagagtgcatgtcaatccacacacggccaagcgctggatgcaggatcacaccacatgctggcagctaaactgactcgaacacagcgtgcagcctgatgggcagatgccaagtgacacgaccagtggt

SEQ ID NO: 14274 - DNA, 139 bp, Glycine max
  Coding DNA Sequence Number=SeqID_4495
gtagttcctcctcggaatgggtacaaggatcattattgacctagaagcatatattgagagtttacaagaatcagccatcactgtatgctggcagaattgcagcggttccctttcttgagacatggcatggatgaagtta

SEQ ID NO: 14275 - DNA, 521 bp, Glycine max
  misc_feature (137)..(137): n is a, c, g, or t
  misc_feature (207)..(207): n is a, c, g, or t
  Coding DNA Sequence Number=SeqID_4496
ggtagcacgacagtactcgcatcaatagaaaatcctgcattgatgtctccccgcgaaaaggtgtgtggaggcactgcgtggcgcgagcgtaggcggggccgtcttgtaggtgtccgtgcctcagaccatcctgcaanacgatatgaatataccgcgcaagacaccagcactcccactgcagcgcccacacatgtcgaacacgggtgntggacgggcagcgcgggcgtctgcatatataattgatggcgagtggccgcccacacaacgcaccggcagcggcacgcaattagagcaccatagagaacgacgcaccgcgacgtcgctgctgagagtcctatcgactgattcaattatacactcccaccacacaaggccggcgctggcgcacaccacgtagtgcgtgtgatacggtagtacgaaacgcgctgaaacgcagagcgcgcacgcgcggcgtcgtgtcgtgagcgtcgttgctacatatcgcctcatccgcactacgcgcctacgatgctgccgtggaa

SEQ ID NO: 14276 - DNA, 521 bp, Glycine max
  Coding DNA Sequence Number=SeqID_4497
gctttgccttgctataccgaggttagctcggagagattctcataaacatgtacgtctgacttcagatcaaagggcaacatgagtaccacctaaaaccctcctaaaccaaccacggagatctcatcgaacggacaaggctaatactggacacgacgcacgactctcttatttagatcgtagcgtacacgataacacggtactgacgacgacagtggaccggcactggaacggatctagagctgaccgcagtcggcaatgacgacttgcttgcagaaaaagctcgctgcgggagcccgccttctctaagctcttgacaacttccatgccctcgacgatctcagcgaaaaccataaggttgccgtccacccagttggaaatcaagctgcgcatgaataactgtcatccgttgcggcagcctgcatgcgtgtgaccatgaagatgatccatgccttgactggcttgtctattgacttatatccggcattcttatcgcctcacatggaatcatcgccggctgctat

SEQ ID NO: 14277 - DNA, 518 bp, Glycine max
  misc_feature (171)..(171): n is a, c, g, or t
  misc_feature (329)..(329): n is a, c, g, or t
  misc_feature (340)..(340): n is a, c, g, or t
  misc_feature (466)..(466): n is a, c, g, or t
  misc_feature (476)..(476): n is a, c, g, or t
  misc_feature (487)..(487): n is a, c, g, or t
  Coding DNA Sequence Number=SeqID_4498
cagagcgcgctctcacggtgcgtgatgtggaccgctgatgatctatagatacttagagtgtggtctgtgtctctgatctcatattgtacctcgatcatagcgagtcaaatagagacaacgagacaaccagcgatacggtgaagatatagatagtataaccaagccactcantctctatcacatcaaacacagatgtaccacactataaataatgacagtcgggcggttgtgatgatgacatatgtgtcctatatgtgtgggacagcggtctagtaaagtatacactttcgtatatgattctatatctaagacgatgatcataacggttntcccgccgtcntctcgtgtgcgggcgcacgcgttgagataggacgcgtgccgtccgcgtggcagacctctgatggaggatgtggaatgtgagtatttcatagaacacctattccgcctctgctttgttatcccattngtgctcttcntagacgcgccncgcgccacacaggcgagatcagacgttgcta

SEQ ID NO: 14278 - DNA, 576 bp, Glycine max
  misc_feature (209)..(209): n is a, c, g, or t
  misc_feature (273)..(273): n is a, c, g, or t
  misc_feature (307)..(307): n is a, c, g, or t
  misc_feature (426)..(426): n is a, c, g, or t
  misc_feature (523)..(524): n is a, c, g, or t
  Coding DNA Sequence Number=SeqID_4499
aacatgtgcatacctgtcagtttctctctcttcatctattaaacacatacaatctcgctgtccaccacaaatagagtctgtgctcattcaccactacaccacacctgtgctaaatcacacacaaacatattactctgtctgctacctcattcatatacaccttctccatctatatatagttttcacatccatgcctccctatattcttntactattcttctctgcatgttgtggtgtcggtacacgtagcacaggtactccatcgtggtgatnttggactaatctattactaatcgataactatatnatgattatacaatctcatatcaactcactatctctcctagctactctctatcaagactaatctatcatcctacgtctctttctctctcacaccgtctctcttgtctctctattctgatntgaagtgaccgttccaccagttactactcattacacacactacacccgctatgtctcttctcacaccataatatattcgccgcgttatatgttatannacataaaatctacaccacacacacactctatcagcacttctattacaaccac

SEQ ID NO: 14279 - DNA, 489 bp, Glycine max
  misc_feature (88)..(88): n is a, c, g, or t
  misc_feature (211)..(211): n is a, c, g, or t
  misc_feature (363)..(366): n is a, c, g, or t
  misc_feature (368)..(368): n is a, c, g, or t
  misc_feature (372)..(372): n is a, c, g, or t
  misc_feature (375)..(375): n is a, c, g, or t
  misc_feature (413)..(413): n is a, c, g, or t
  misc_feature (415)..(416): n is a, c, g, or t
  misc_feature (456)..(456): n is a, c, g, or t
  Coding DNA Sequence Number=SeqID_4500
aacgacgcacaccatggacctcatacatgccacaccagcgcacacacaagcatattaccctaacatatagtattatcatctacgatangaagtacacactactcttcattactagagacacatacataaatcagaagacatagagacatactaatctcatagatggagttcagaatactaattaggtatatcatctgtcgacccatcacanacatcactcacacatctatacaacgactatcaaatcacatactacagtaccacacatctacacgagacatcgcatcaagtgcgacgacacacgagctacgtgctacacagaccagcgacagtcacatcgcataacacagcgcacaccacaannnngnctgnagngtgtgctcatctttagtactactaccagtgtgtggggntnnttgaggcgtgcgattaaattatatgtcgtctctcatagangggtggtcactctcctcgtaatgaatctcttcg

SEQ ID NO: 14280 - DNA, 393 bp, Glycine max
  Coding DNA Sequence Number=SeqID_4501
tgaacttctggacctggggttgccccttgaaatatatacggataaacagtccaagtctcaaactcagtggtctctacattaaaagagtctctcgcttggagcttcgctggctgcattacatgtttggataaatgacttgtccaagactttggaatcaggagaggatcttccccccctgcttggaattaaacccggtcatgggaaacacaggtattcggacaaaggtttggcaaatgttgtcaaatcccatttgaaggaactcaatgctccatcccataaggctccgaaaaaggtgggttggtttttgcctccccaggtaccaccaaagtcagggttggagtttcggaaattggttccggcaaaatttttgatctcaagggttttaaggaaggc

SEQ ID NO: 14281 - DNA, 497 bp, Glycine max
  misc_feature (69)..(69): n is a, c, g, or t
  misc_feature (79)..(79): n is a, c, g, or t
  misc_feature (186)..(186): n is a, c, g, or t
  misc_feature (380)..(380): n is a, c, g, or t
  Coding DNA Sequence Number=SeqID_4502
agggtggtctattaatcgtagagtatctcgcaacgctaatggacagacactgattacagaaacatatanacaagacacncgtggtcgtgtgagaacacacacgcgcgcggtagggaagacgaaggtgtgcacttacttgtgaatgcgagtgaatgatagcaacaacagagaaatgacaggcaaganggaaagtagaggcagataggggtgaagaagggatatagagggcgagtggagagataggagtgtgaagtatgtcgtaataaaaaatatgcatatggcaggctctctactagcgtcgaggaggaatagacatggcgatagatgttcgagggaggagagggagtcgcgatacaagagatggagcttatcgctctcanagagtgctactaataaatagtaaaggcgcaggcgtgtagagatgataaatagcataagaatatatagcatatttctcttcgcaggtctcccggcgcggcatcttcatcttatcttct

SEQ ID NO: 14282 - DNA, 400 bp, Glycine max
  misc_feature (95)..(95): n is a, c, g, or t
  Coding DNA Sequence Number=SeqID_4503
gaggtgtgttcgcttgtcacccctacagagtgtgctgtgaaacagtaattcgggacgtgatgctaaggtctttctgcactagcgtgggagttganctgtcgcagtagaccgaatattatttattttgtgatcccagctctgagacgaccgcgcggtggcgtcacgtcccctagtcgtctcgagagctaatcaagatagttcctgattgtcgcattccggtgagtgcgcggccgcgactagcttcactctttcggccgaggcgggggcacggagtggtggaggagtgattcttgctggctaaacacatactgtctcgctgcctgaggttatgcggtgtgacgcgggtgctcgttcgttgtctcacggcataatctactctgtctatgagggtacatccgct

SEQ ID NO: 14283 - DNA, 456 bp, Glycine max
  misc_feature (103)..(103): n is a, c, g, or t
  misc_feature (120)..(120): n is a, c, g, or t
  misc_feature (178)..(178): n is a, c, g, or t
  Coding DNA Sequence Number=SeqID_4504
ggaacgcatcgtactaagactacatttaatcccagcagtagtaggtgatgttagttacactcatctacatatatctttactactatatatgtaatatctatgnaacattccagtagaaanacatctatagtatatacatcgtctcctcctgctcttcgccgtactgctcttccctatnatgtatagtcgcacgctctctatgtatattaaccatctcatcgacacataacatccacgtcatataattcgcccgacccacatctataatcgctacttctatcagatactgtctctgcctgatatcgtgttgaatgctctctctggacagtctatctgttctcttctcatctgccgttctggcgctgttagtgacacgacgagatgacgtacactgtgtcatgtacactgacgaggagcctcgtgccgtattatgtacttacgacatccgctatacga

SEQ ID NO: 14284 - DNA, 499 bp, Glycine max
  Coding DNA Sequence Number=SeqID_4505
gcggatgggaatcttctttcttgtcatcaagcagagtcgccacgtaagcttctagtctcaagtgagagtgttatacagtacaatagtacagatggtctcttgtatgtgatagatgccatatccttgattctagagaattgacttgtaccaggtatggtccaaagatgaaatacacgtaatgtgatgttggctcagttaatggactaaagcccatggtttgagcctatcatccctctatattaactcataatagacgtattgcacgcatttcatgtcatatcatatgtaccaccaatccactgagaagcgtagatcatatctgatgtcagaagcaccatatttatgagctcgcagtaatgccttcgtcgaagagacagtcactacaagcatcccctaacaattgagtcattgtttaagaggcaaactgatatatcggctggtccagatgctctggcacgggtgttgcatataatagggtacagcaacagcctcaacaggc

SEQ ID NO: 14285 - DNA, 560 bp, Glycine max
  misc_feature (91)..(91): n is a, c, g, or t
  misc_feature (118)..(118): n is a, c, g, or t
  misc_feature (179)..(179): n is a, c, g, or t
  misc_feature (441)..(441): n is a, c, g, or t
  misc_feature (520)..(522): n is a, c, g, or t
  misc_feature (524)..(529): n is a, c, g, or t
  Coding DNA Sequence Number=SeqID_4506
gatcatgaggtagacagcgcgccgagagaatgtataatataatgagtcagagagcgtggcggccacacctcgtcttctggtgactcgtgcncatagtacggagtcaggccgccagggnttgcggcgccgccccacaccacacgagccctgtcatctcagcacatgatatatgtcccgcnggcgccgcgcgggctctctcccgcggccgtgcccccgtccgtgcctcgcctcagttgttgagacttcgctgccgcccaggtcgacacacacgagaagaaggaacaaaccagataccaggaccgcgcggcatgcggcagcgcgtgcaacatcacacacagaaggtccaacgtagacactcctttacacttcacgcgccagcgcgcacaggcaagccacaacccagtaaggcatgtagcccccctctgctcaccctccacccanatcccaagaggagcggtgcccagctagcattatgcaccaccccatacagacacccccgttcggcgccccgggggggggnnnannnnnntttgtgggccatcacaccactaactattagt

SEQ ID NO: 14286 - DNA, 194 bp, Glycine max
  Coding DNA Sequence Number=SeqID_4507
aggagtatctgcctattcgtgtacagcaccgaaatggtatgaaaagcctgacaaccgttcagggattgccaaaggaattcacctcttccaagatacttaaagacgtcacgaatgagttctgttgcaatggaacagccgctcaagacccagcacctggacaggttattcaacttctaggctaacaggaggtgagt

SEQ ID NO: 14287 - DNA, 511 bp, Glycine max
  misc_feature (75)..(75): n is a, c, g, or t
  misc_feature (200)..(200): n is a, c, g, or t
  misc_feature (219)..(219): n is a, c, g, or t
  Coding DNA Sequence Number=SeqID_4508
tcaatgtaaagttaaaagccctaatccaaactctgttaattcacctcatatcaagaaaaagaagaagaagaaggnataaggataagacgaagaagagggggatgcgacggaagaggagtgattctccggcggatgagatcactccggtgcggcggctgtttgataccctgcaggaagtgttctccagtggcggtcctggnagtattccttctgaagatnaaatcccacagctacgagacattctttgatatatgaaaacaggggaatgtcggggttaactcccgaccatggccctattttcccgaaaccgactacgggacagaaaaatggtctttcccacccaaaaaagtactttggttttaacccaatggggacaaattctccgaacggggaattttttttggttgccgccccttttggggggggtttcccctttttaaaaccctcccggggggggaggttttttaaagaggtttccttttggaaaagggagcataaaggcccttttatg

SEQ ID NO: 14288 - DNA, 456 bp, Glycine max
  misc_feature (236)..(236): n is a, c, g, or t
  misc_feature (352)..(352): n is a, c, g, or t
  misc_feature (360)..(360): n is a, c, g, or t
  misc_feature (362)..(362): n is a, c, g, or t
  Coding DNA Sequence Number=SeqID_4509
gagtatattacgataaggctggttcgtgcactagtgggatgcgcacatcgacgggcgacgacctgcggactcgcatggtggatgtggcctacttctcttaattggtgcaggttgattgaaatacaagagagatgtgtggtggttggaggaaatgacggaagaacggtatggctatgggaacatgtgtgtttcgtggtgagagcgagccgcgggcgtttttttgttcatgtcatagngtttaattattatatatttgttataatatatcatgtatgtactcacttattccagctggttgtgattaagaatactaaataattctgatggtaggtattggctttgtgggcgtcanttattctncnctattcgccctccctgcagtgaccccgtggggtgtctacatcttatttatggtatgtggtttacgccccccttatcggtgggagacacggttag

SEQ ID NO: 14289 - DNA, 466 bp, Glycine max
  Coding DNA Sequence Number=SeqID_4510
ggccgagccctcatgggcccgtaaagctcccgccctcgcgctgctgccggcacgccgtcggcgccgccgcccacatccgagccgctcctcctccacaccgagccgcagacagcgaggccacgtcggcgccggcctgctaggacccaaatatgggccgggggcgcgccgccggccaccagcgccaccaggccaccccgccgccaagaggcagcgccaccaccgcgccagccgccggcccccgccaccagggcgccggaccaccgccagccgagctgctcccgccgccgagccctgccccgggaaggacgctgcgcgcggggaaaagaaggcccgccgccgccgagccacccggccagatccgggggcgccgtccggcggcggcgggggagggagaacggaggggcgggagcgaggaacctgtggtcgggagagggagggagctaagcctttccgccttctttcattg

SEQ ID NO: 14290 - DNA, 327 bp, Glycine max
  misc_feature (106)..(106): n is a, c, g, or t
  misc_feature (126)..(126): n is a, c, g, or t
  misc_feature (129)..(129): n is a, c, g, or t
  misc_feature (149)..(149): n is a, c, g, or t
  misc_feature (188)..(188): n is a, c, g, or t
  misc_feature (244)..(244): n is a, c, g, or t
  misc_feature (254)..(255): n is a, c, g, or t
  misc_feature (264)..(264): n is a, c, g, or t
  misc_feature (267)..(267): n is a, c, g, or t
  misc_feature (271)..(271): n is a, c, g, or t
  misc_feature (274)..(274): n is a, c, g, or t
  misc_feature (280)..(280): n is a, c, g, or t
  misc_feature (282)..(282): n is a, c, g, or t
  misc_feature (289)..(289): n is a, c, g, or t
  misc_feature (293)..(293): n is a, c, g, or t
  misc_feature (296)..(296): n is a, c, g, or t
  misc_feature (302)..(302): n is a, c, g, or t
  Coding DNA Sequence Number=SeqID_4511
gaagctctgagtgagacttctctcccaccttcaaccatgtcttcttcctcctcttctcttgtcaccactcttgttgataataataaccctactcaaccttctcagntaagagcggcacgccgtcgnttnacctctgatcatcaccttcntgagataagcctcaaaacccctatggttaggccttatgntcgatcaaaaatgcctaggcttcgttggacaccagatctccatcgttgcttcgtgnatgcagctcnnagacttggnggngaanacngggccncnccaaagntggnttnacagcncatgaatgcaaaggcgcttactata

SEQ ID NO: 14291 - DNA, 200 bp, Glycine max
  Coding DNA Sequence Number=SeqID_4512
tgcctgcagacggttgatgatactatggcagtacatagccattgaaaccagattgttgaagaaagagcaggaaaacttgctctagtgaagtatcagcaagtgctttggcagggaagggtattgactattgaactctcaattcattgatgaattgaattgaagacttgagaaatcagggatgttgcccactgactcctgaa

SEQ ID NO: 14292 - DNA, 563 bp, Glycine max
  misc_feature (55)..(55): n is a, c, g, or t
  misc_feature (258)..(258): n is a, c, g, or t
  misc_feature (397)..(397): n is a, c, g, or t
  misc_feature (441)..(441): n is a, c, g, or t
  misc_feature (509)..(509): n is a, c, g, or t
  misc_feature (538)..(538): n is a, c, g, or t
  Coding DNA Sequence Number=SeqID_4513
actctctagctctctagcgctattactaactcactgtggaggtattcggtacggnggccgcccgcgtgcgcgcgcaccatcattcctccacactgagcctttcgtgtgcggtggttgtgtgattatttattgtcgaacatcaaatatgttcatcgcgtgtgaatgtgtacaaacattaatagctatctctctggcacatccgcatctgtatcccgttattgctcttatcgatcgcctctgtgtccactcgcgaaccgnccacatgacatcatcattattcacatacatatatatacactgctccgaatacggaccatcgtcatgcgtcgggctagaacggttccgtagatctcagtgcgcttatcctatccgccgcgaccttgagacggtgatgtgnttcatgtcttgtatacatgcacggacgtgtatctgtgtacgatnatccaacgcagcacattctacaacgtatgcgtgtaactcacacatcgacactcacacgcacccgaccncataacgctgagagcggatgtgcgagcgntgacagaagcatacgcgcgcgagtc

SEQ ID NO: 14293 - DNA, 230 bp, Glycine max
  Coding DNA Sequence Number=SeqID_4514
tgcgacgtctcaagaaatttcgttcgactcattagggaagagtggcaatcagaccgccaggttttgaacggggaaggggcctgcattttatccacccttcaattcaattcccggcaagggccggggatttttctgggggggaaaaacttgccgtttaaccccgggccccttttgggggggggccccccaaacccggggaaaaggttcttttaagatcttccccaagaagg

SEQ ID NO: 14294 - DNA, 433 bp, Glycine max
  Coding DNA Sequence Number=SeqID_4515
ttcgacaacatgaacctccttgaggacttgctccgtggtgtttatgcttatggtttcgagaagccctctgccattcagcaacgtgccattatgcccctcgtgaagggagtggatatcattgctcaagctcagtctggaaccggaaagactgccactttcactgttggtattctccaacgtcttgacttctccgttcctgactgccaagccctcgtccttgcccccacccgtgaactcgcccaacaaatccaaaaggtcgttattgccttgggagactacttgaatgccaaatgccatgcttgtatcggaggtaccagagttagtgatgacattaccaagctccgcaatggtgtccacatcgttgtcggaaccccaggtcgtgtccttgatatgttgtgccgtaatgtcctccgccccgatagaatcaagatgt

SEQ ID NO: 14295 - DNA, 565 bp, Glycine max
  misc_feature (26)..(26): n is a, c, g, or t
  misc_feature (58)..(58): n is a, c, g, or t
  misc_feature (94)..(94): n is a, c, g, or t
  misc_feature (123)..(123): n is a, c, g, or t
  misc_feature (185)..(185): n is a, c, g, or t
  misc_feature (216)..(216): n is a, c, g, or t
  misc_feature (218)..(218): n is a, c, g, or t
  misc_feature (254)..(254): n is a, c, g, or t
  misc_feature (265)..(265): n is a, c, g, or t
  misc_feature (278)..(278): n is a, c, g, or t
  misc_feature (298)..(298): n is a, c, g, or t
  misc_feature (342)..(342): n is a, c, g, or t
  misc_feature (358)..(358): n is a, c, g, or t
  misc_feature (370)..(370): n is a, c, g, or t
  misc_feature (372)..(372): n is a, c, g, or t
  misc_feature (377)..(378): n is a, c, g, or t
  misc_feature (381)..(381): n is a, c, g, or t
  misc_feature (390)..(390): n is a, c, g, or t
  misc_feature (432)..(432): n is a, c, g, or t
  misc_feature (436)..(436): n is a, c, g, or t
  misc_feature (457)..(457): n is a, c, g, or t
  misc_feature (490)..(490): n is a, c, g, or t
  misc_feature (500)..(500): n is a, c, g, or t
  misc_feature (503)..(503): n is a, c, g, or t
  misc_feature (519)..(519): n is a, c, g, or t
  Coding DNA Sequence Number=SeqID_4516
atatgtcagcgagtcgtgcgtggctnattcgatagcgatgctataagacactatcttngttgtcctagtgcctgtagcggtatcgcgactgcgnatgacctagatagacgatgataagactcnctcatgtacgcatgcgatcgcacatatatgcgcatgtcgtcgtctcgcacgcgctcgctacnatcgacggtcgcgcgcatggcgtgctgaggntngtcgatcgcgtgcgagtcactacgatgactatgtgngtctcgcatcnatgattgcgccgnactccgcgagtgatcgtccntacactcgtgccgtctggtgctacgtcgctggacgctattatancgtatgcacgcatgtncatcatcatgtntntgaanncanccatgggcngcgcgcactactcgttccgactacgtcactgtcatgcacgcntgtnctcatcgtgtggctgatgtgngggtactaatatgacggatcgactactgtcgtngagaggtatnttnacgtagtgtaatctanactgatatgagtggtggttgtgacgtctcgtgtgtgttgcagtgta

SEQ ID NO: 14296 - DNA, 553 bp, Glycine max
  misc_feature (73)..(73): n is a, c, g, or t
  misc_feature (109)..(109): n is a, c, g, or t
  misc_feature (130)..(130): n is a, c, g, or t
  misc_feature (159)..(159): n is a, c, g, or t
  misc_feature (166)..(166): n is a, c, g, or t
  misc_feature (199)..(199): n is a, c, g, or t
  misc_feature (205)..(206): n is a, c, g, or t
  misc_feature (211)..(211): n is a, c, g, or t
  misc_feature (234)..(234): n is a, c, g, or t
  misc_feature (236)..(236): n is a, c, g, or t
  misc_feature (244)..(244): n is a, c, g, or t
  misc_feature (260)..(260): n is a, c, g, or t
  misc_feature (267)..(267): n is a, c, g, or t
  misc_feature (289)..(289): n is a, c, g, or t
  misc_feature (294)..(294): n is a, c, g, or t
  misc_feature (359)..(360): n is a, c, g, or t
  misc_feature (372)..(372): n is a, c, g, or t
  misc_feature (376)..(377): n is a, c, g, or t
  misc_feature (403)..(403): n is a, c, g, or t
  misc_feature (410)..(411): n is a, c, g, or t
  misc_feature (413)..(413): n is a, c, g, or t
  misc_feature (444)..(444): n is a, c, g, or t
  misc_feature (454)..(455): n is a, c, g, or t
  misc_feature (474)..(474): n is a, c, g, or t
  misc_feature (494)..(494): n is a, c, g, or t
  misc_feature (514)..(514): n is a, c, g, or t
  misc_feature (521)..(521): n is a, c, g, or t
  Coding DNA Sequence Number=SeqID_4517
tacagtccgatagtaccgcgtcgcatgtcgctctcgttcgctgcttgtgtctctcatatgcgcgctcttcatnaccttccgactcgcatctcaccagtctcgtctactntcaaatctgcagatatctacnatagtgcgtcgcagactgcacgtatagantacatantgcatagacgtatcatatctcatgctgcatatngcacgnnatccnctgcatcatccctcgtttgcgtngncgatgcancacacgacggtactgntattganctgtcatcacttcagctcactnacatncccccattatcgtctgtctagtcgtcgatgtcgttactagtgatcagtacgtcatatgtcgaccnnctcgaccgcccnattnnacccgtgtgtcgtcactctacatctncgtatgnntnagcgtatcgctatactactatctctctgcgncgctctcatnnacactttcgctcgtgtcantgttattgattatagtcgancatctatctaacatattttngttgtgngcgccaccatcagccgtccagcagtggttgct

SEQ ID NO: 14297 - DNA, 572 bp, Glycine max
  misc_feature (81)..(81): n is a, c, g, or t
  misc_feature (300)..(300): n is a, c, g, or t
  Coding DNA Sequence Number=SeqID_4518
gattagtccataggctctgacatgaaagtgtgtcagtgagttgtgtttgttgtagtgctttattatgtctgtagatgtagncttacgatttatacacggcgagactatgagacgatgcgaccagcgtcccacgatttatactctagactcttctccctcactctatgttcttagggtgtgcctcggattgtggacgcttacatctcgctacaagacgatttacatatatgcgtatcgtccgctcccgcacctacaccgtcagctgtagattgttcggctgtcacgcttcatgcgacatantattctctcgagtgcgtatactatgttaactcacgtaatcgcgctgataggtacgtgcgtcagcaatagtattagttgtgatagactcttcatctggtcaatgaaacacggcgaatagtgttcggttatcgctaggggctgagggatgcaccagagccatacatcgctgcgccggttgtctctagacggttctatcgctcgagcgcattgcgctactaccgatggctctataacgacgcgagacagtgagtatgtcgctcgctaagtgctct

SEQ ID NO: 14298 - DNA, 577 bp, Glycine max
  Coding DNA Sequence Number=SeqID_4519
atggttcggctgctacgagaccttctcgctgttcttccgccaacgtgcacaggctgccacaggcgagaaggaccccaccttgccgatctggcagagcatgcttgcaggagccggagctggactcggatacaacttctcattctacccagccgacacaatcaagtcgaagatgcagacaggcgacctatcktytattggcgccaacggaggacgtmagactttcttcggmgtcggtcgwgctctgtkccacacccacggccttaaaggcctytatcgcsgatgcsgyatcacactgctscgaarcggacccagctctgcattgatttttacgatttatgagagtctgaggacgtactttggctaasgctcttgtgtgtttccgcggkgcatgacatgacacagctctgacgattaagagcacacttattctattacgacacgttttattcccttttggttggcgatttgagcgagtatttgtgggcatagcactggagtttcatggcgcaaggactgtgaactttcaggtggtggaagatggggaaaaaaagcatcatgcatagcgaagaggtggaca

SEQ ID NO: 14299 - DNA, 490 bp, Glycine max
  Coding DNA Sequence Number=SeqID_4520
tgatgattggcgtgacctcgatcctggccatcggcaccgtgctgcaagtgttgttcggcgggccgttctgggtgtcggtgctgttgggcggtggcgtggtggtggtgtattcgaccatcggcggcatgtggtcgctgaccctgaccgacatcgtgcaattcgtgatcaagaccgtcggcctgatgtttatcctgctgccgatctgcctgtaccgcgtcggcggctgggatcaactggtggcccagttgcctgcgtcgaatttcagcttcaccgaaatcggctgggacacgatcatcacctacttcatgatctactttttcggcatcctgatcggccaggacatctggcaacgggtgttcaccgcccgtgacgaaaaggtcgcccagtacgcaggaacgttcgccggcttctactgcatcctgtacggcctggcgtgcgcgttaattgggatggccgcgcatgtgctgctgccgaacctggacaacgtcaa

SEQ ID NO: 14300 - DNA, 334 bp, Glycine max
  Coding DNA Sequence Number=SeqID_4521
tataacaataagagggagaacgcaaatgggaatgatgacgatgtgcacgctaagccacaaacataccctggtcctgaggtgaatgtaactcaagattaacataaaaagtgggggatgcacatggagcgcataaccctcgagaatgtgaatggttccaccgtcaacgttgggattcacccctccaaggttgtgctagaccaagctcaaattggacaaagaccgtaaggccattctcgatcgcaaagccaaaggtcgcgccgccgccgataaggagaagggtaccaagttcgctcccgaagatatcatgcagaccggtgatgagtctgtgttgccc

SEQ ID NO: 14301 - DNA, 586 bp, Glycine max
  Coding DNA Sequence Number=SeqID_4522
atatcggttaccagcgaactgccggcttacctcgaaaatagcgatatagacatacgcgcgaaatcctacaaggacagaatgagtgttatattaatatttaccaaggtgtggctgttgtgagtatataatctaagcgtgatgacacttgctattgggtgacttttgccttcgctgcgatatcgcgctggtcctggtataatgctcctaattctcgactgggtatacgccgtggggccagtgctttaatcggcctgctcacaagtgaggttcgccccagggagaatacggatacacgtctcgtctcatctcagagctgttcggaggggcggggcttccgtcccttcctgtagcatatgttgcgataaactagcttcttggagcttgcatagagtgtcaccgtgtgcgtgctcagccgataatgattagtatcaacatattgacgatgtccatctttttcaatctctctactcttaagggatgagggggagccttcgcatggctctacctcctggcgcgggaggggtgtgttgtctacatccttgctgttgggcgttccggatatatacccatgagtacgcgcgagttc

SEQ ID NO: 14302 - DNA, 305 bp, Glycine max
  misc_feature (27)..(27): n is a, c, g, or t
  Coding DNA Sequence Number=SeqID_4523
gagaatgtggctgcaatgtacagacanagtagcaaagagagaaacagaaatgcaaacaagatatcccttctgtttgatcctacacggattttaattttgttcatctcttctaagcaagtatttctgccaactgcatgatggttcaggatattatgtggatcaaatgattggattctttggttgtgaatttatcttctgttttctatgtaaatatatgtctctttcttttttcttttttaaatgaagaatttgatttcttcccttccctccccatttttttctctttacttagatgtccactgctg

SEQ ID NO: 14303 - DNA, 551 bp, Glycine max
  Coding DNA Sequence Number=SeqID_4524
acaactcctcccaaatgactgtaaaaatctgtttcaacaaccaaacccatagaatctccaagaacccagttgactataccgctttacttcaaaaagtcattgagatctttggaaatcaactccctcaaaactggactctccagtatcttgactctgatgatgacaagatcatgctcagtacccaagaagactacaagactttacttgaagaagaagctggaaactcaagcaaatctataaagatctttgttttagctttggaagaaaacatgaatcaaagtcaagttttggcatctttgatggcagaatctcaaaagaaaggaagcgtcgagattatcgatgaacctatcgaagaacctcaagagccagtcaaggaaaataaagctgaagaagaagaaattattcaaaaagaagaacctattgttcaagaaaaggttattattgaacaagaagagccaaaggaagaagccccagttcaagaagaagaacaacccaaagcccaagaagcacaagaagaatctgatatgcatcctttggacaagcttttattc

SEQ ID NO: 14304 - DNA, 421 bp, Glycine max
  misc_feature (345)..(345): n is a, c, g, or t
  Coding DNA Sequence Number=SeqID_4525
gatcccttgcaggtgtcgactcgaggatgaccgaccgcgcgatgtaattctctccttcctacatcaagctctatctcacagtataacgtatagaaaaacatcatatattggcgatataggtatatacataagcgagggcacgcataaggcactacattatgttattttgtgtcggttcctttttcttacttttcctcgtcgcaccgtgtgcgggtgtccatttatgttgtatgtgacgggagaggccatagagcatggagcgtagcagagcgaccgacgagccacagcacgcacccggcaccgcggcgaaacagcaacagaagagtgcacaaactctcttgtgantcaccgccgggttgcggctcggcgccggccctttcccagagtctgtaggagatgcgcgatgcgttagcgtgcaact

SEQ ID NO: 14305 - DNA, 322 bp, Glycine max
  Coding DNA Sequence Number=SeqID_4526
agagacatggactctccagagaaaaaacaaggccttccctctaatgaaggcgtgcaggatattttgtacactgaactgtggcgtgcatgtgctgggtcattcgtttatgttcctcgcgttgatgacagggttttctacttccctcaaggccacttggagcaggttgctgcatatactcagaatcagccagatagtcacctggaaattcctgtgtatgatttgccttcgaagatcttatgcaagattatgaatgttgaattaaaggccgaagcttactcagacgaggtttatgctcaagttacattagttccggaggtccaga

SEQ ID NO: 14306 - DNA, 591 bp, Glycine max
  misc_feature (467)..(467): n is a, c, g, or t
  misc_feature (521)..(521): n is a, c, g, or t
  misc_feature (558)..(558): n is a, c, g, or t
  Coding DNA Sequence Number=SeqID_4527
ctacgacgcgcacaagagcagcaaagagagagatacgcagataagtcagaagaatatgagagcggggtagtcctcacaggaagcctccgccctccgtcgagggccgagggcaacgccaactaactctcctcactagaaggagacagaggcacgatcccgccacgccctcgtgccgcgcacctgatggcgatcttccctatacattatacatacatgtgcaattaatatgtcgataggtgagacttcagccaccgctcactccggcagacaagacacgagaggcaaggacataatgtacatattctcagtgttaccacaaataaaaaaattcccaccccttcatacatatcacagccactcatacttattacccacaaccccgcgacatctagtagtgaagcggtcggcccgagccgtacaacataagtctgcacatcccatataacacctcacgacggtctgtggtnggtgtttcgcttatggtgcgacgcgcgcgagccgtcggtctaggagtggcagtnagatcggcctagcaattgatgagggggtgggggtagnaggcacccccggcgaacagcaaccagtgagaac

SEQ ID NO: 14307 - DNA, 556 bp, Glycine max
  misc_feature (387)..(387): n is a, c, g, or t
  misc_feature (417)..(417): n is a, c, g, or t
  misc_feature (506)..(506): n is a, c, g, or t
  misc_feature (526)..(526): n is a, c, g, or t
  Coding DNA Sequence Number=SeqID_4528
gatgtgcagtatacgagtacggcctgggcggagacaggccagtcgagagggagagggagtgtgtgtgtccctcctgtgcctccgcctcagacagaacaggaacgcatgcaataaacgtacgatattataactctgatctcttgtcttgttcactggacgacagacgtggctcaagagtggacgagagtatatgaccgacccgagccgcgtataagaagatgaacaaactatatctatggccactgactgtcgctggagcgtgcgtgggtaactagtgtcgtagacgatagcgtctgcatgtgtgacgtccagtatctcatgtagtaaatctacggatgggttgcgaagcgagatgcctatctgccgctcacacatttcggatgggcntctctcaccacacaactgctatatatctgnttctctatgacactataaattctgcaccacacctgtacacaatacgccgcacgcgctcactctataagacacggtgactgtaatcagcncactcgtcggcgagtcgtcncgcgagcactgctcactctcacctagatat

SEQ ID NO: 14308 - DNA, 394 bp, Glycine max
  Coding DNA Sequence Number=SeqID_4529
tctggttttagctgtgaatttggtcagatactataatgaagattattccgtttattctcattgccttctttctactcttgacatcatttccggctcagattaaagccggtagacgcggtagacgccctatgccaaataacccaatgccagcagaatgcaaacacattgacgattgcgtcgctcccttgataaatgtgtcccaacggaacaattcacactgttgtaatgcgttcaaaagtagagaatcgattcaatgtatgcgtacactatttgcgtccaatgattctttcataaggtttgggactgttggtatttgtaaggcgatatgtcctgaactcagcaattgtagctatcgtccaaagacatatagactcatacccagtagcggatctag

SEQ ID NO: 14309 - DNA, 541 bp, Glycine max
  misc_feature (74)..(74): n is a, c, g, or t
  Coding DNA Sequence Number=SeqID_4530
gaagccgcaactagacatgggatatgaccatacaaggaggtagtagatgtgcatcactcatcatccgcactcgntgtatctcgtctctcacacatcagcatacatcattccatcagagagtatctagctagctgcccataaccacggcagtattagcagcgggagatataagaagcagctgagcaaccccattatctcgcttcccatataacctcccataacactcataattgcgcggctggtgagcgcgagccgggctcacatgagcgcacggggtcaagcgccatggtggtgaggaagcaccggaggcacactaaccatcagtcgatctgataccttcacacagagatagaataatcatatctccaccatgcgcgacaattccttgttctttatcatttattctacatactatcattataatacacacatgttgatgatcatttgttcgtacccatattccaatgattactcattaagtttagcacgggggagaggggggcgtcccccacatatttcaagctgtagttcgagcgctcat

SEQ ID NO: 14310 - DNA, 457 bp, Glycine max
  misc_feature (429)..(429): n is a, c, g, or t
  Coding DNA Sequence Number=SeqID_4531
tacagggcgacgatcctagatccccccgcctccgactcgagcaaggagcagctgctgccccaacctcacaccgccgacctcacaccggcccaagcaggggtggcacgcctcatcctcatcttcctctcagcgcagatagagatggcggcggctggatctggctaagtggccagtgaggatgacggcttcaccccccccgcccccagtcaaagtcaacggccacttccaatgggcgtcgccatgttcttcctcacgcgtcgccgaccggcagtgagaaagaggacatcgtgaggctcgaggaggttgccatcaccaacggcgaagaggacgaggacctcctactcgatatgacaactcagccgtgaactttaaaagagcaaacaaggttctggtattggagtctgagctggtgggaaagtgatccaaganatttatatagcgttacctgaatgcacaa

SEQ ID NO: 14311 - DNA, 575 bp, Glycine max
  Coding DNA Sequence Number=SeqID_4532
acaatggcaccaagactgtataattatctgagaaaggtttgtgtctaccttgcaaaagcaaatatgcatgactatgaactcttgagccagcaagactactctgagctggcagcatccactctgtttgttgcttttaagattattgaacaattggataaaagttttccccttttcgaaatgttgaacaaggtgagacaaattttgaaagttgaagaagatattgtttatgattgtgcttcacgaatcctttcgatcgcaaagaattttgacaagttgtatcccaaccttgagaatctgaaaaaattccactcctttaattttgaagatttgccagaatcaaaagactctaaagtatgccaaaaaactattttctgaagtaaataggcattgtatcattttgttggaatttttattcaattttttcgttctcatttttttttgttgcagaattgagaaggcatgaaagggtttaataaaatccaagagagtgaataggacacttggagtgtttcagtttttatatttatttgtcaatgactgtctatttattggccttcgctaacttcatttattat

SEQ ID NO: 14312 - DNA, 506 bp, Glycine max
  misc_feature (236)..(236): n is a, c, g, or t
  misc_feature (261)..(261): n is a, c, g, or t
  misc_feature (290)..(290): n is a, c, g, or t
  misc_feature (374)..(374): n is a, c, g, or t
  Coding DNA Sequence Number=SeqID_4533
gacgacgaggcgtatgtgcccctctcgagtgttgtgcagcatgtgtcagagtgtaaaggatcgttgaatgtcctccaccgacgcacgagttaggagtatgaccaagtttttattatccccccattttatatacacagccccatagtggtgaatcgcacagtaggtaagtccacctggtgtaccacgccgcttttctcttagggtcatgtccacaatacacagagaagtatctaccnctatgtgtatcgtacatgttgtaanagtgtgcgaccgtatgtatgtcctcgtanatgattgcacaggtctgttgtaatatgaatgtgaatgctgtgttggaggtcttaccatcccgatggtccacacgggatggtgtngtgacaccattgttagttagacgcagatgatgtagacgcagatattttactcactatatgtacccctctgtctaccactctctcgtggtgggcgagaggggttatcgctacggatattcttgcgacgcggaa

SEQ ID NO: 14313 - DNA, 552 bp, Glycine max
  misc_feature (148)..(148): n is a, c, g, or t
  misc_feature (194)..(194): n is a, c, g, or t
  misc_feature (209)..(209): n is a, c, g, or t
  misc_feature (246)..(246): n is a, c, g, or t
  misc_feature (283)..(283): n is a, c, g, or t
  misc_feature (426)..(426): n is a, c, g, or t
  Coding DNA Sequence Number=SeqID_4534
accttcatagctcacgtctcggtgacgtggtggagcgacgcgagatgaccggcaacacgacaaactccatgactcacgagaagagacgcaagatacaacacagagacgatcctatcgtgctcagcacgtaacacacagatatgtgtgngtatgagatactacgtattctatgagtcgcgtaggtacgatcttgnaccacacatatagcntccctgcagcttgcgcgcgcctcgtccacacggacantatgtctatctgtctacagatagatcagagcgtgtgnagtcgtctacacactactcggagtaaacgcactcgatgaggctgatacgcatctctgactgcacactacgttagagattatgatgcattaagtgagcatagtcatactctgtaagtgtctaacacctcactataatacaaaancgtagacacaggtacactgatcggtctctataggcacacaatgtgtctcatctatctgatcacaacgcacgccgcacactctatcaccctcatgccctcactacctgtgcgcgtaggtcatgcgat

SEQ ID NO: 14314 - DNA, 587 bp, Glycine max
  Coding DNA Sequence Number=SeqID_4535
gatttttgcaagactttcaccaggaactgtcattagcattgtcactgattcaggagacttaatcgggccagttcaattcgtatcattcgatgcgtcaacaagtgttgtctttgttacacaagaaagctcagtcacaccaacaggctctgctacgactttattagatgtagataaagttgaaagtgttacgttcacgtcttaatgtgagagggccatcatgaagcttctttatattagctctggctacggcggaatctatcacatgtttgatcaatgggtagaagagagcttcattgattcccccttttcatatgtaaagattgatagagaatctctacccgctcacatgcacaaaatccggacattttctccggattttgttttgatgatgatcggtgatcatgttccgagcgaagtacttcatcaattcaaacaagaaaagatcccgatcgttctatggatgacagaagatcccttttatacagatgtatcggctgcttgcgcacaagatgcgcggatcatcttaacaatcgatgaaggggttttgccattttacaaacaattaggcgctgatcatgcgcactact

SEQ ID NO: 14315 - DNA, 338 bp, Glycine max
  Coding DNA Sequence Number=SeqID_4536
gaacaaccgacgatgatgcacctggtactcccggagatgatgatgtggcagtcgccggacctatcggaagcgaaacttcgtacgcaaactatccgccgcctcagcaaacttccggcagtggcgtcactgctatgattggagtcgtttctgtcgctgctacgacggttggatcgttcttctttttctgaggtgtgattggtgcatgtaatttaagaaattaataatgtttttattgaatgttttggagtaatacttttttccttgtagatgtatcatgtataagcattttgcttgtcccttcatgtataacattgggacggtacatatcattacaacat

SEQ ID NO: 14316 - DNA, 563 bp, Glycine max
  Coding DNA Sequence Number=SeqID_4537
agcaggcgcgcaaatgttagtttacaacgcgtgcgtctcgagtccaaatcccatccctgttctcccgcttgagatcggtggctcacagcgtcggagctaataaatgaggctatcgacaacccagcgcggcgtcctgcattctcggtaagtggtgtgtactctgcgctatgggatcgttagccgcacaacataatctatggtactgcgtttgcggagcggacatcacgctacggatccatcaccagcgaacgcagcctacgcgcggtcttacaacaacacgcagcgcgcgggggccagtacagagcgacgtgatatatactagacccccgattactaggtccctctcgaaggaataaattacacttagattcaaatgcatgcgcgcgtaaccagagggcacgcgagtcaatcgagagggggcggcggcgcggccagagaggccggaggaccaatatggcgggcttacgtttacgcccctccacgtcgccacacgcaacaccaacaaaacatacacaaagaccgcccgaccaccgcgcgcgatgccacggccacgtagtgaacaa

SEQ ID NO: 14317 - DNA, 561 bp, Glycine max
  misc_feature (111)..(111): n is a, c, g, or t
  misc_feature (155)..(155): n is a, c, g, or t
  misc_feature (162)..(162): n is a, c, g, or t
  misc_feature (233)..(233): n is a, c, g, or t
  misc_feature (244)..(244): n is a, c, g, or t
  misc_feature (252)..(252): n is a, c, g, or t
  misc_feature (376)..(376): n is a, c, g, or t
  misc_feature (381)..(381): n is a, c, g, or t
  misc_feature (425)..(425): n is a, c, g, or t
  misc_feature (446)..(446): n is a, c, g, or t
  misc_feature (468)..(468): n is a, c, g, or t
  misc_feature (501)..(501): n is a, c, g, or t
  misc_feature (507)..(507): n is a, c, g, or t
  misc_feature (530)..(530): n is a, c, g, or t
  misc_feature (536)..(536): n is a, c, g, or t
  Coding DNA Sequence Number=SeqID_4538
gtaccacgcagatcagatacgactgatctcaatatctctgatcttcttgttcgtgatgatactagtctggttactatttatctgcgccgtccactatcacacatccgtgangtgcgacttcgctctgtacgtcactctcgtgctcgcgctctctntcgactnccacgcacctatacatcactacacgcacgccgctcgtgctcgatacgtctgtacgcgctacggagcgatgngcctagcctantctagatncagtcagatctatacgactaactctcgttaatccacatctctcactgcggcctcctgtactactaatgtagcactatgatcattaacactacacatttcaatcgacgttcgtcgctgtccgcangtctncgcgagtagacgtctctctcgtgtctatgtttatactatcagantcgtaagtatctctcgtatgnctcttttcacatctcgatatcncacacattactacatcgtatcctgatactcgtnatctcntcgcgttacagatcgatatcatnacaccncgctgtacgttgtcacgcatatgtt

SEQ ID NO: 14318 - DNA, 581 bp, Glycine max
  misc_feature (144)..(144): n is a, c, g, or t
  misc_feature (259)..(259): n is a, c, g, or t
  misc_feature (363)..(363): n is a, c, g, or t
  Coding DNA Sequence Number=SeqID_4539
atgtataggagagtcgcgcgaatcgacgcgcatatacagaccgaatactcgatctataatagctggcggcggcgtgtatatacacgaaccgggcgcgccgcagtattttatcggctacattccgtgtcgcggtgctggacaaanaccgcgcgaacgttgcccgctattccactattgccatcggagtgttgatattctatctgtatacgcgcggccagcggggggaggcggtggggctgatttggcggcgtctgtaccncacacacttatcggcagatataccttcgtgcgtggtattaatatgatactcccgcgcacgtctctcggcgccaaatgcgctatacggacatcgtatattacgantccacctccggacggtatgcggctactgttaatatgattccgactcgcaccggtgcgcgcatcacatatcatatataagggtgagatgcgagccgacggcggcctgcgaggggcacatgcaaggaacacaatatcttaactaatcgacaacgtgcgacgcgcgtgcgttgtatacacggacactatgaatatcaatttatacagctgcgatccgtcta

SEQ ID NO: 14319 - DNA, 300 bp, Glycine max
  Coding DNA Sequence Number=SeqID_4540
gatggcaagataagatgaagtccttgaaatgtacttgtcctagctccagcagatatctgaaaacccattaaacttgtcccagacattccaccagtaaacccaagatgtgtataaataaagttcagaaaaataggggataaacttggaagttctcagtaccaatttttagaggaaaaacaaaacttcaggtttcaagaccttctggtaggctttttctattatttggaaatttaaattggaaggaaggtgaagaatttttatttgcattttaactcttatcagccaaattaccttcaaaat

SEQ ID NO: 14320 - DNA, 403 bp, Glycine max
  Coding DNA Sequence Number=SeqID_4541
aagccgatctggagcgatggcccgtcagcgacgccggagaatccgtcggaatcggagaacggtgaggagacagacgcggcgacgatggtagttgaagagctggtgacatcactcaacacacagagactctacagggagctaacactatccctccgaacaggcttacgcgacgcttgcgctgaattctccttcctccgcatccgcggccttcgatctcttctcaaaactctccgatctatcgccgaatcagactccatcattcgcctcttctcccacacccaaaccgtctccgatctccaactggttccggtgctttttcgacattcgttgaaagaagcggaggatgatagagtgacgagcttagatcacatattcagcgttgagccgatgaagataacgagtc

SEQ ID NO: 14321 - DNA, 197 bp, Glycine max
  misc_feature (33)..(33): n is a, c, g, or t
  Coding DNA Sequence Number=SeqID_4542
gtattcgagttgttctgttgcaaaatgcttgtntcactctccaccgtgtgattatgatcaaacggccgctagcttccctccttggagtcacacattgaccacgtacgctgggccgtcccctctcccccagccggaggaagcttccagaaccttcagccggagcaacggagcgcgagacatggtggtgctgcacgtga

SEQ ID NO: 14322 - DNA, 589 bp, Glycine max
  misc_feature (26)..(26): n is a, c, g, or t
  misc_feature (45)..(45): n is a, c, g, or t
  misc_feature (117)..(117): n is a, c, g, or t
  misc_feature (145)..(145): n is a, c, g, or t
  misc_feature (152)..(152): n is a, c, g, or t
  misc_feature (172)..(172): n is a, c, g, or t
  misc_feature (215)..(215): n is a, c, g, or t
  misc_feature (337)..(338): n is a, c, g, or t
  misc_feature (343)..(343): n is a, c, g, or t
  misc_feature (370)..(370): n is a, c, g, or t
  misc_feature (389)..(389): n is a, c, g, or t
  misc_feature (391)..(391): n is a, c, g, or t
  misc_feature (411)..(411): n is a, c, g, or t
  misc_feature (461)..(461): n is a, c, g, or t
  misc_feature (477)..(477): n is a, c, g, or t
  misc_feature (490)..(490): n is a, c, g, or t
  misc_feature (497)..(497): n is a, c, g, or t
  misc_feature (538)..(538): n is a, c, g, or t
  misc_feature (563)..(563): n is a, c, g, or t
  Coding DNA Sequence Number=SeqID_4543
atacatatgatagttatagcgtcgancgagataggtagtgtaggntgccgagaacacacactgatattgccgcctctcgcgtaattgcgtgctagctgtatatcagtgtagttggancgtagtgagatgcgctacgtatgcatgntgttgancacgactacgcgtgtctcgnatccgtacaacgtgacgaggtagacgagtgcaccatagcgtanagaagcgagtcgtgactatatagcacgaggatcgcgctggacaacaatctgcgtcgcacattcacaactacatacagacacagactagagatgcgttggtatatgtaaatgtgtgtggtggnnagatnagatgcacttcggcgacgagcgagtgngaacgcatagtacgcaggngnaggaggcagcggacgggagngtcggcggcgtcgctatcgagcgtgcggggatggcatgagctggagtcgngtccatgtcatgatgnacgtcgtgtcgangccgtanctttggtatgcgaactcatactactaataaagacatgcccntgcgctcatatagattatacagttnattcactatagactcttaatcaacga

SEQ ID NO: 14323 - DNA, 528 bp, Glycine max
  misc_feature (184)..(184): n is a, c, g, or t
  misc_feature (305)..(305): n is a, c, g, or t
  Coding DNA Sequence Number=SeqID_4544
ctacacgacggaattcgccttctatcgcacaatacatttattgtcctcatattatactatagatgctcatcctatatcttccctactcccatactctgtctatccccttctctcgcgaatgttcacgtatgttcatatacacgcctagatggtctgtacaacaaacagcagatgggtatctcgnctctgagccgctctctcgaattagacgtctcttacctcgcgcctctcttgctacaacactcgactcctccttcactatctcgtctcgcttcgactctcgttgtagtttcttaacatacccncgtaaatacaacctttcactcctcaccactctctagactatcaagacattatattgatacatactttctattcaactctgagatgactattgcttcctctattttctttctgctctctatctcagaatgtactgcttatcatacctctacgtctcaccatctcgcacctatatataatactgctccacatcggatacatactgcaatctgatcgccgatatcg

SEQ ID NO: 14324 - DNA, 477 bp, Glycine max
  Coding DNA Sequence Number=SeqID_4545
gaaaggccagatgtactgagcacaagaaagcaattaaattaacaaagagagctatatatatatatatatatatagctaaaacatytataatagtcatcatgtcagggcagagaaggtcgtcaagaacttcaaagttcactgagattgagattaatgaacttgtgtytaggttacaagttytgcttytgcaagtgaaccaaagaggcaactcaaggcaatcagcgtccaagatyttgcaggaaacctgctgttacattaggaagctgcaggaagaggtggaacagctcagtgagagactatcagagctcatggattytgtggatatcagtgacattgacagaagaactttacaaaaccttttgcaacaatattaacaaaatggccccttttytacagtgataaataccttgtctcccttatatatgtttgttcccccagtactgtagctaggttgtaatggagcctttcctaattttg

SEQ ID NO: 14325 - DNA, 396 bp, Glycine max
  misc_feature (251)..(253): n is a, c, g, or t
  misc_feature (298)..(300): n is a, c, g, or t
  misc_feature (302)..(302): n is a, c, g, or t
  misc_feature (339)..(339): n is a, c, g, or t
  misc_feature (341)..(343): n is a, c, g, or t
  misc_feature (358)..(359): n is a, c, g, or t
  Coding DNA Sequence Number=SeqID_4546
gaaaagcatcaccaaactaatgaattaaggtgcaacaatttcacttgttttcacaaatatgacaaaagtaataaactcactatttgtcacaaatatgccaaatcactataacaaaataaaaaatccaagatatagatagaattagaacagcaatggataagattacatcagatatagactatattgaacagtcgatgtcgcacgcgtccctgagtgtgtcaaagacctctgccgagctactctgcccatcnnnagaacgaacccaacttctatctatttcgtgctaatcactgactcnnncntaggattggcccacgatacctttgacaatatcgcctncnnnattacctgcagcatnngctcctggccgaatagatacagtgaatgcccatgcgc

SEQ ID NO: 14326 - DNA, 443 bp, Glycine max
  misc_feature (108)..(108): n is a, c, g, or t
  misc_feature (154)..(154): n is a, c, g, or t
  misc_feature (172)..(172): n is a, c, g, or t
  misc_feature (263)..(263): n is a, c, g, or t
  misc_feature (276)..(277): n is a, c, g, or t
  Coding DNA Sequence Number=SeqID_4547
gggtggctctggttgtctcattaacgtcgtcaaaaatgctgcaaacccgtcccggcggctccggtggccgctcggtgctggtgggggtgaagatggtctcccccagcnaggaattgctcacttgggctttggtcaaagttgcacaccctggtgntgccgggggggctctgcntgttcttgggatcattgaaaccgtgaatggagacgggaaatcgtcgctgctttcgcttgtcaaggcgtttgactctgttcttgctgcttgnttaggattctgcnntttgaaacaggtggatctcaagctctttatttgccgtggttcgtcagtgttgaaaactttggttcgtgaagcgtctggttgttccgcacctcatgttgtggtctgggctactcgtggcctgcgtgggttccggtcttctaccggtgttgctggtctctgtgctcat

SEQ ID NO: 14327 - DNA, 592 bp, Glycine max
  misc_feature (101)..(101): n is a, c, g, or t
  misc_feature (258)..(258): n is a, c, g, or t
  misc_feature (328)..(328): n is a, c, g, or t
  misc_feature (404)..(404): n is a, c, g, or t
  misc_feature (427)..(427): n is a, c, g, or t
  misc_feature (431)..(431): n is a, c, g, or t
  misc_feature (445)..(445): n is a, c, g, or t
  misc_feature (447)..(447): n is a, c, g, or t
  misc_feature (538)..(538): n is a, c, g, or t
  Coding DNA Sequence Number=SeqID_4548
tactactcgcttactcattgtctcatgacgtctatctcatatgctgccgacacgacgctgcgctgtgtcatatactatatatgatttcgtgggttcatcancacgatgcttgctacagtcgatgtacagctaatcgcgctgtgagagaagagtatatgtctgaagacagtggagtggagagcgagtccgtgtgcgtggtgcaccaccaacacaacctcctcactcaccctgctcacgctctatctctgtccttcttanttaactcacgtactatctctgctgtgtgcgcgtagcgtctaacacatacgcgcgcgcgcatacacccagncgcgtgtctccacatatatcgcacgtgcgtgtgacatctatatctgtacgataatatcattgtctagctgctgtgncgcgcgctgccgacgacgccccnccangcgataggaaggcncngtggtcgtataacgatcagatataccataaacaaccaatgacttctgcgcgcgtggcgcgaggtgtgggaaccagaagaggaggacgcggngcagcgtgatgtcggatgtgagccacgtttacgtgataatcacccgcaactaca

SEQ ID NO: 14328 - DNA, 498 bp, Glycine max
  misc_feature (44)..(44): n is a, c, g, or t
  misc_feature (355)..(356): n is a, c, g, or t
  Coding DNA Sequence Number=SeqID_4549
agctctgcgccgagtcagcactgagcacaccctgccgaacacanccacccatactactccgctgcacccacgagcctctacttatataatatcgcgtctcaccgtcacctaatctcttagcgctagtgctgaagaggtgcagcaatactcttatctcgcgaagaactgcagtatacgctatatatctcaggtctgagcccctctctctcttctcttaaaccctagttacatgtctacacctcactcaagtacagacggccctggcgcaaaggaaccaggctcaatacagactttatcctacagcacttgagggactatggagggcttctcctagggcttgatctgtcctcaagtnnacactgagatccaaaactaaagaagtccacctccctgccagccccccgggggggatgcccacctcacctctcaggatcgcgaccccgcccccgccgcggggagggccgccccgcctctatccaactttctcgagccattcag

SEQ ID NO: 14329 - DNA, 585 bp, Glycine max
  Coding DNA Sequence Number=SeqID_4550
acactcatggtctaaatctaaacagatactatacaaaccctagtgttattgaccatccgagtatatatgccgctaagagtgttgtacttgagctaaataatagtaaaagactattcctgtattgtgacttgcatgcacatgcaaccaaaagaggatgctttgtatatgggaataactttgaatttagagagcaagttgagaatatgcttttccctaaacttttatcgttgaactcgcaatatttcgactatgatgcttgcgatttttcggaaaagaacgtacatattaaagacaaaggcgatggcaaaaataaagaaggagctggaagagttgctttatacaaatcaactaacctagtcaaatgctatacactagaatttaactataattctgggaaacagaaaaatatcctgtcaagtcctcgaaaaggagaagagctatcagcacaccaccaagaagccaagactcaacaagaggcagatggattagctactctcatgaatgagaagcttcctttacagggaagctatattatagagcactttgaggaagttggagagggaattgggccaactctacttgata

SEQ ID NO: 14330 - DNA, 509 bp, Glycine max
  misc_feature (143)..(143): n is a, c, g, or t
  misc_feature (434)..(434): n is a, c, g, or t
  misc_feature (463)..(463): n is a, c, g, or t
  Coding DNA Sequence Number=SeqID_4551
tagggtgtatgtctcgtgtatagttgacgggaatgatgcatgcaccaacaacagtagatgaataaggatgcactgattatagcaccgcacatagagacacctatctagtatacatttgtatacattatcagagaatgtgtggnagcacaactacacgcactactagcgtacgagacagagatagggcagtgcagacaccgacaaccgcgcatggcactcagccactcgtgctctgtggcttactgtgccactagttagtgtgataactaccactgaatctagcattgaatcacatgttatgagtacgaacattgctattatgaaatatatatacatatatgtaataatattagcaaatatactcataccattgtgacgagtcatgagcacgagagcacaagcaactatcacatcatgttgaactggtgacccgnagagagtgttctcgtgtcgtgactcattngaatgtgtgtctgatcgcaatgatctctctctcgtattctgatatg

SEQ ID NO: 14331 - DNA, 389 bp, Glycine max
  Coding DNA Sequence Number=SeqID_4552
aaaagtcgcttaacatcgaagcaatctcaccagaaaagaaaaagaaaaacatcgagaggctttcgggagacaatctccaagaaatgggcaagggcggggtccacccgtcgccgtcgccgccggcggccggcggcaagacggcggagggggtgctcctccggctgctccccgcggtcgtgctcgccatggcggcgccgctggggcccgaggggaaggaggtgctcgcgtacctcgtcctcgcctcgctgcgctcctcggcgccgcccacgccggcgagggaggagccctccgcggccggggaggggtgcgggaggaagccccaccgcccggagctcgcgtgcggctgcttcgggtgctacacggcgtactggtcgcgctgggacgggtcc

SEQ ID NO: 14332 - DNA, 587 bp, Glycine max
  misc_feature (51)..(51): n is a, c, g, or t
  misc_feature (101)..(101): n is a, c, g, or t
  misc_feature (119)..(119): n is a, c, g, or t
  misc_feature (123)..(123): n is a, c, g, or t
  misc_feature (266)..(266): n is a, c, g, or t
  misc_feature (279)..(279): n is a, c, g, or t
  misc_feature (298)..(298): n is a, c, g, or t
  misc_feature (300)..(300): n is a, c, g, or t
  misc_feature (333)..(333): n is a, c, g, or t
  misc_feature (336)..(336): n is a, c, g, or t
  misc_feature (353)..(353): n is a, c, g, or t
  misc_feature (393)..(393): n is a, c, g, or t
  misc_feature (412)..(412): n is a, c, g, or t
  misc_feature (414)..(414): n is a, c, g, or t
  misc_feature (429)..(429): n is a, c, g, or t
  misc_feature (453)..(453): n is a, c, g, or t
  misc_feature (509)..(509): n is a, c, g, or t
  misc_feature (529)..(529): n is a, c, g, or t
  misc_feature (541)..(541): n is a, c, g, or t
  Coding DNA Sequence Number=SeqID_4553
tatgatatataatactaccctcacactactacacacaacaaccggccgccnctctctcacaataaattcaatatacgacatgatgactacgcagcactgcngtgtcgagcgacgacgtntagncgtacagacaagtgaacatcaacgacagacgcgcgttggtgtgtgatgcgcgacactacggtctgtagataacgaacacatactgatcatcagtcacactccctcgctccgcgcgccgcgcacacgttgataatgtgactcgntgcgtacgtctgnagctgcgcgctatagtgtnantcatatgcccacgctgtgcttgtggtcagtatnatnagatatccgcgactgcntgtctggcgcaacgaaagctcagcacacacacacagactncgtacacacagcgacaacnanaagcaccgaatcctntagtctactgctgactcacacagnacgacatggggtagtgggctctcactacaaaacgatagtgtctgtataacgtaggngctgctaggacgagtcgacnctgtgcccatcntccgacatcatgatcgagtcgtctatcgtcgctgatgtcgccgcgg

SEQ ID NO: 14333 - DNA, 599 bp, Glycine max
  misc_feature (97)..(97): n is a, c, g, or t
  misc_feature (159)..(159): n is a, c, g, or t
  misc_feature (324)..(324): n is a, c, g, or t
  misc_feature (394)..(394): n is a, c, g, or t
  misc_feature (430)..(430): n is a, c, g, or t
  misc_feature (521)..(521): n is a, c, g, or t
  Coding DNA Sequence Number=SeqID_4554
cttttatcgagcagtctccttctacctcattcgtgtcataccctcgtctctctactaggcacactagcacgtaaataatatgatagtcgctctcgtntgcgagcgcatattcatacgggtgctacatctctcacacacatgtgatagcagaatagaccnatccgcgatagaacggtacacatactcgcatatactctcgctcgatcatgctccagtctcacatatgttagaagtgagtgctaccatacactatatctatcaatgtcgatattggagtgcaatatatgaatgataaccgcagccgcgctcgtgagtattgtctanctattctctacaccgtatatagtgtacagcttcgagtctatacctctctagattattgctcgcacacgtnacatatgtcctctgctatagattagctctaccgaanaggcatactatacgatactagcgctctgtactctataactgacgcggatacactaatataatatacaacgcgacgtataatcgtcaacctnttatgagaaatggtgtgtgctcactgctctctaatatctcgagagtgttcacctgacggctcattctctatgttcgtg

SEQ ID NO: 14334 - DNA, 455 bp, Glycine max
  misc_feature (72)..(72): n is a, c, g, or t
  misc_feature (197)..(197): n is a, c, g, or t
  misc_feature (274)..(274): n is a, c, g, or t
  misc_feature (299)..(299): n is a, c, g, or t
  misc_feature (320)..(320): n is a, c, g, or t
  misc_feature (348)..(348): n is a, c, g, or t
  misc_feature (414)..(414): n is a, c, g, or t
  misc_feature (422)..(423): n is a, c, g, or t
  Coding DNA Sequence Number=SeqID_4555
aggtataactcgacagtcgccgcgccgctcccgccagcgcgcgccgaagcacacgcgccacgcgagacaccnagcgcagcgcggacggacggagcgccgcggcaggaataggaaagacgcgacgagcgggataaggagagagccgagagagagatcataatacacaatgacgacgagccgcgagacggacgcgcgcnccagagatgataaaagataagccgcgcgcggcgcgcgcgtagaggcgcggcgaagtacacggagcacgcgcggaaanaccaacagacacgacgcgctgcacngacgcagacgcatgacacgcnagagagagccggccgcccgcccacatangacgacactcgcgcggggcgcgcgcaggcgtacagcggcggcggccgacgaaccgacgcagatcanaaataaannaagcagtgactagcaaaagacaagacgacgga

SEQ ID NO: 14335 - DNA, 293 bp, Glycine max
  misc_feature (185)..(185): n is a, c, g, or t
  Coding DNA Sequence Number=SeqID_4556
cggtgatgatggtatgtctgattttttttttctttttctgtttcatctatttgatttgtggtgattccaatcaatctgaaaagatcaaatagcaagtatttatttgattccaaatttcaaatttctgattatttatacaatccccagtgttaaaagtaatatatatttttggggtaagttataanagtaataggggatctttttagcattacaaagaagtatttgataggtaacagataatctgggagttctacaagaaacttttccatattttgaaacaatggttgggaaat

SEQ ID NO: 14336 - DNA, 452 bp, Glycine max
  misc_feature (285)..(285): n is a, c, g, or t
  misc_feature (332)..(332): n is a, c, g, or t
  misc_feature (359)..(359): n is a, c, g, or t
  Coding DNA Sequence Number=SeqID_4557
gccatcgctgaccattcagtatatttgaactctatcgtcacgatatcccatgtcggtcaatatatacacatctgagtctaccaccgttgcatctacgcataaacatgatacgtaaagcacgcagatcacaagacatagtagactaacactgacctaacactgattacaccgtaatcagctcacatctgccctcctcatgcctatgtgcgagtgaatcctagcaatctgtaatactaacaatgccgcgagcgtatctcaatcatggtctctacaatctgtatactntattgtagtaacagtctgatcaagctccagcactatacacacactcnaagcataacgaagcacaccgagcaccngagactactactgccgagcagcacacaccgacgcactatactctgtactactcatgtaacacagagctagaatgttcttatgagcctccgact

SEQ ID NO: 14337 - DNA, 553 bp, Glycine max
  Coding DNA Sequence Number=SeqID_4558
gaggttacaacttcgatttcatcatcttcttcaactggcttaggggctggcttaggggctggctttggacctggctttggacctggctttggacctggctttggacctggcttgtggaattgattgaagaactttccagcttggtcttggatcttttcgttgatttctccgaagaaatcaaagatgtctcgctttacaatgctggattcagttgaatcttcatcttcatcatcatggtgcttgaagatatcgtcgaaagtcttttggagttgagcgaaaactttagcggcttcgtcttgggccttttcattgattcttccgaagaaatcgaagatgtctcgcttttcaatgattcgttcagtagtaacttcaccgtcttcaatttcaatttcgattccgtgacttcctgggtgcttcttgaataaatcatcgaaaactcgttggagatcagagaaagccttttgagcttgggcttgagccaattcattcaatcgtccaaatcgttcaaagatatctcgctttgagattgatcgttcagttgaatcttcagcat

SEQ ID NO: 14338 - DNA, 215 bp, Glycine max
  Coding DNA Sequence Number=SeqID_4559
agcaggagacccagccacgcaatcttggacatgtgccctgctaggtaacaagttgtgatatcacacccctcttcctgtttttactttttaggatttaacgtcttgacatgtataagttgcgtcccgattgacaaatgtgaatcaacaaagctatggtccccgaaccttaaactcaatggacctatgcacggatcaattttcataaagggctttct

SEQ ID NO: 14339 - DNA, 231 bp, Glycine max
  Coding DNA Sequence Number=SeqID_4560
gggtggaatctcttctcggggattattgtcgttagacctaaaatgcccgtgtggtgggagaggtactattggggggggggagtggcttggaccttatatggattgattgcatctcagtttggagatataacggggcggaagccgggtgaagataacaaggaggtgaaagatttcgtagaagactactttggtttcaaacatgacttcgaaggagtgtgtgctgttgtggtt

SEQ ID NO: 14340 - DNA, 546 bp, Glycine max
  misc_feature (73)..(73): n is a, c, g, or t
  misc_feature (370)..(370): n is a, c, g, or t
  misc_feature (411)..(411): n is a, c, g, or t
  misc_feature (423)..(423): n is a, c, g, or t
  misc_feature (515)..(515): n is a, c, g, or t
  Coding DNA Sequence Number=SeqID_4561
gatgaattactcgtttaaccaccgccctgtctatattgattataacaacccaaaccctcgtgtttcacaacanctctactaatgttgaataaaaagtgcgtcataatgtgttggcggagctccgctaggtttgtaataagtatacctcttatctggtaattcaccctgtggttaatgagcgtatgtagttttcttcttctgggcacatgatgtcccccgcagtctacttccacctgtagtctacttacttattgtgttgtgagacactcactccacatatgcactcgcgccctcattgccatcccactagcataagactgtgcaagtgcggtgcactcgtctgcgcgcagtgcgctgttctacctcaatntacggaatacatatttcttatgtatgtggagtatgttcgcnaccctagcaccntgcgaggttgcgtggcaatgtgcacttgcgagacatgatattcagacacacaacacatcgtatggcagtgagtatgtcactgtgcctcggantccatgtctctgtacgactgtgtggtgctga

SEQ ID NO: 14341 - DNA, 483 bp, Glycine max
  misc_feature (28)..(28): n is a, c, g, or t
  misc_feature (30)..(30): n is a, c, g, or t
  misc_feature (192)..(192): n is a, c, g, or t
  misc_feature (234)..(234): n is a, c, g, or t
  misc_feature (236)..(236): n is a, c, g, or t
  misc_feature (268)..(268): n is a, c, g, or t
  misc_feature (270)..(270): n is a, c, g, or t
  misc_feature (371)..(371): n is a, c, g, or t
  misc_feature (376)..(376): n is a, c, g, or t
  misc_feature (411)..(411): n is a, c, g, or t
  misc_feature (420)..(420): n is a, c, g, or t
  misc_feature (442)..(442): n is a, c, g, or t
  Coding DNA Sequence Number=SeqID_4562
acacctactagctcgggttaagtgatgntnacttgtctgaatgcacatgcgtataatatagaggatgtgtgactgactcacacgcactgtcgtaattatacgatgttgacacacggtgctggaacacaacaactggggattctctgctgcgagaaatctgtcatggcgactcgcagacttggttctcatatnactatagtggctgtggctgagcatatatctgggtagagtgangngcgcgatatatactacattgcgtcttgacgananaagatatgcgcagcgatgctgacgatcgatgtgtgcatacactatatcatactgtgggtatgagtgtatgtgtcgggcgaagaatatatataacgtgggcngtagntctgtctgagatatatcgaatgcagcgactatagntgcggaggncgtgtgtgcaactactacgcgnaaatacgtgagtgcgagagttgctgtctgcttactaatgat

SEQ ID NO: 14342 - DNA, 144 bp, Glycine max
  Coding DNA Sequence Number=SeqID_4563
ggagaattctgaataattccatgttaaaacgcctttcaactctctctactttctcaaacatcaagtcactttcagcaaagccaatccttccatatagtgatttttacttcgatcctcctcctagtgaagcttggaaacactttc

SEQ ID NO: 14343 - DNA, 147 bp, Glycine max
  Coding DNA Sequence Number=SeqID_4564
ggtgagcgggtttatagcgcctattgtgggccccaacaggggagtccccatttttagaggggggcggggaaataagggcttcgggggggaaacggggggggggaaaagaaaaagaggggggctatgggacgcggcagggttttgggc

SEQ ID NO: 14344 - DNA, 574 bp, Glycine max
  misc_feature (312)..(312): n is a, c, g, or t
  misc_feature (425)..(425): n is a, c, g, or t
  misc_feature (428)..(428): n is a, c, g, or t
  misc_feature (463)..(463): n is a, c, g, or t
  misc_feature (482)..(482): n is a, c, g, or t
  misc_feature (532)..(532): n is a, c, g, or t
  misc_feature (544)..(544): n is a, c, g, or t
  misc_feature (546)..(546): n is a, c, g, or t
  Coding DNA Sequence Number=SeqID_4565
tctgctgacgcgcaatatgctgttatacctaccgcagtcttactaccattcctctactcgtgtttgcacatctgtattatatattgtcttatacgtgttgtcgttaaccgccgcgtgcgtccgcgcgcacttcaccaataacacaaagaaacacgtaccgcacacacacaaatccccttctcggctactgtgtatatcataattaaaacagatatatagggcgcgatggctcgaggagatggagatggcaacataaaacactagataggcagagatatattgtctcgacagcgtattctgtgctgtgtcgcncctatatataatatataatatcacaagaaacaaatatattccgtccgggtctatacaggtgctattgtatatgcgtacgcacaaaacatctcatctcctatctgtataatatntgngggcgcggcgcatatacttcattggtctgcgttanctcgatcttgtgcttactntcggctcccgatcaaatacttattctatatgattcttacactcctctctnatactctattcncncgcgcgtgtaacacagcgtggctccatg

SEQ ID NO: 14345 - DNA, 400 bp, Glycine max
  Coding DNA Sequence Number=SeqID_4566
gatccgaccaaaatccagctcaaatccctcgcctcgcgtcgcctcgccgtgccccggctggtgcccgctggcctgcctcgttcctctcggtctcggattggagagatcgatttccatggccctgccttgtacagtagccagctgccgcttgctgttgcatctgcgcagctggtgcatgatcccccctcccaaatcgtagtcgccgccggctcacgacctgcccaccattgctcaaccaccgctcccatcccatccggttgcgagctttggccttgattttggtgtctaccccgtctagggtttcaagctcaagctcagggtcggcgtttcaggtgaaaaatctattaccatctcccagttactctgcgtgattttgtttccctcctaggtaatcgagtgt

SEQ ID NO: 14346 - DNA, 266 bp, Glycine max
  Coding DNA Sequence Number=SeqID_4567
gtgggaggtagccactactacctaattattaatggcctgaatttcgaaaacaaacttcatccagatggtacatttgacccattggggcttgccaatgatctagacccagctgcactgctgaaggtgaaggaaattaaccatggaagacttgctatgtccgccatgcttggattctacttccacccttatcgcactggataaggtcctgctgataaccttgcaacacatctcactcacccctttagcaacaaatcgctcactgccct

SEQ ID NO: 14347 - DNA, 551 bp, Glycine max
  misc_feature (120)..(120): n is a, c, g, or t
  misc_feature (206)..(206): n is a, c, g, or t
  misc_feature (258)..(258): n is a, c, g, or t
  misc_feature (296)..(296): n is a, c, g, or t
  misc_feature (315)..(315): n is a, c, g, or t
  misc_feature (359)..(359): n is a, c, g, or t
  misc_feature (418)..(418): n is a, c, g, or t
  misc_feature (431)..(431): n is a, c, g, or t
  misc_feature (486)..(486): n is a, c, g, or t
  Coding DNA Sequence Number=SeqID_4568
tgctgtgcttatatcaccgtctttgcgcgccgctcatcttcttcgctcctatctctcttctctccactctccttgagattctttccctctacgttctcttctctcgcaggctctgacatnttgtacctcgtttatcatcttgtcgtctcatatttacatccctctgcatactatcatcgcgctgcatttactatatctacattctntttaccctcttcttctcctgtgcgtatgtatatgcgtgtggtgttcgataanaacacacactcagcgtgcagagggcgttgagcgacacntatgagctcgcgacacaanctcctacacttctctcctctaccgcgccaccgtgtggtcagacnatatactcatccatacctcgtctcgcgacttctccgcttgcgcgcgttatccgacgcgnactataatgatgncgtatgagatgcgcgtgctgcaaaaacaagagcacggtgcgcggtgtcgtcatantatgctgtgtgatctctgtctgctttactcctctcatcccacttcatgctctcacatcacttacg

SEQ ID NO: 14348 - DNA, 375 bp, Glycine max
  Coding DNA Sequence Number=SeqID_4569
attctccgagccaacaagtagcagcgccgcaccatttgaacaagattcaagctcacgatggctaggattaaggttcacgaactgagagacaagtcgaagagcgatcttcagaaccagcttcaggatcttaaggctgagcttgctctcctccgtgtcgctaaggtcaccggaggtgctccaaacaagttctccaaaatcaaggttgtccgaaaatcaatagctcaggtgttgaccgtgacttctcagaagcagaagtctgctctcagagaagcgtacaagaacaagaagttcatccctcttgatctccgtcccaagaaaacacgtgctatccgcaggcgccttaccaaacatcagctatcgttgaaaacagagcgt

SEQ ID NO: 14349 - DNA, 299 bp, Glycine max
  Coding DNA Sequence Number=SeqID_4570
gaactatttgggacgagcattttctggctttgcctctgagtacttattggcccaataccaagttcccttgtcccttggtcgtcactctaggcatgcctttcttttggggttggcacatttctaattgcttttgggatacccaaccctttttactttttctaaaagaatattgggttttggtttggggcccatttgccctttatgtttgccatatatcttgaaaatttgggcttaaaaacctctccactttttccaatttttgggcaagggaagcccccttggctctttcatctttaagg

SEQ ID NO: 14350 - DNA, 209 bp, Glycine max
  misc_feature (57)..(57): n is a, c, g, or t
  misc_feature (82)..(82): n is a, c, g, or t
  misc_feature (84)..(84): n is a, c, g, or t
  misc_feature (145)..(145): n is a, c, g, or t
  misc_feature (151)..(151): n is a, c, g, or t
  Coding DNA Sequence Number=SeqID_4571
aaatcacagaagaatatgttcatgtagtgatgatcactggacctcagcatgagagantgggggtctggatcccagtataganantcatgcacacacagtatgtggaatgtgagtagagtagctactgaagacagcagtttagcanagattntgaactgaaaatcactgtaaacagagagatactgcagatccatgatatgcctcgcccg

SEQ ID NO: 14351 - DNA, 369 bp, Glycine max
  Coding DNA Sequence Number=SeqID_4572
ttcgccccaatccatcagcggagagcagcagcagcaaccagtagccatggcggaacagacggagaaggcatttctaaagcagccaaaggttttcctaagctcgaagaaatcagggaaaggaaagaggcctggaaaaggtggaaaccgtttctggaagaacattggtttgggtttcaagactccccgcgacgccattgatggacattacattgacaagaaatgtccattcactggaactgtctctgtgagaggacgtatcttagctggtacttgccacagtgctaagatgcagagaacaatcattgttcgccggaactatctccacttcgtcaagaagtatcaaagatacgagaagaggcattccaacat

SEQ ID NO: 14352 - DNA, 193 bp, Glycine max
  Coding DNA Sequence Number=SeqID_4573
tgcagtctattctattatccgccgtcaaactttcctaaacacatcaaggtggattgaagaggtgcgcattgagagaggcagtgatgctattattgttcatgttgggaacaaaactgaccttgtcaataagaggcaagtctctacagaggaaggggaagctaagtctcgtgaactgaacgtcatgtttattgaa

SEQ ID NO: 14353 - DNA, 478 bp, Glycine max
  misc_feature (46)..(46): n is a, c, g, or t
  misc_feature (50)..(50): n is a, c, g, or t
  misc_feature (67)..(67): n is a, c, g, or t
  misc_feature (73)..(73): n is a, c, g, or t
  misc_feature (78)..(78): n is a, c, g, or t
  misc_feature (87)..(87): n is a, c, g, or t
  misc_feature (106)..(106): n is a, c, g, or t
  misc_feature (110)..(110): n is a, c, g, or t
  misc_feature (112)..(112): n is a, c, g, or t
  misc_feature (141)..(141): n is a, c, g, or t
  misc_feature (156)..(156): n is a, c, g, or t
  misc_feature (161)..(161): n is a, c, g, or t
  misc_feature (166)..(166): n is a, c, g, or t
  misc_feature (173)..(173): n is a, c, g, or t
  misc_feature (190)..(190): n is a, c, g, or t
  misc_feature (197)..(197): n is a, c, g, or t
  misc_feature (199)..(199): n is a, c, g, or t
  misc_feature (210)..(210): n is a, c, g, or t
  misc_feature (236)..(236): n is a, c, g, or t
  misc_feature (242)..(242): n is a, c, g, or t
  misc_feature (321)..(321): n is a, c, g, or t
  misc_feature (323)..(323): n is a, c, g, or t
  misc_feature (332)..(332): n is a, c, g, or t
  misc_feature (340)..(340): n is a, c, g, or t
  misc_feature (357)..(357): n is a, c, g, or t
  misc_feature (398)..(398): n is a, c, g, or t
  Coding DNA Sequence Number=SeqID_4574
atgagtagtagtgtatagcgagagcagtgtgtggtgctcgaccatntagntaatacgcatgcgactnacgagnatcancattgatcntcatcgacaatcacatgcnatanangacgtactgaatagaacggacgcagctcnctcgaataggatatnctagntctantcgtaantgggagtagcatctttntactggntngacgtagcgcncaatcagtccaaaatcaatgctaaancgaagnaagtttgatggtaactagcaattggtgacgactaaacaatgctatgaacagcactacggaactagtaagatacgctttngnataggtggncgtgctancgactacagtcacgcgngcacgactgttgtgagagtgggattactgagactgacgggnatcgtcatcgtacgagcagcgcgccaagctacctatcatgcgtagcagtggtacctacactacatcaggatattactgtg

SEQ ID NO: 14354 - DNA, 564 bp, Glycine max
  misc_feature (28)..(28): n is a, c, g, or t
  misc_feature (34)..(34): n is a, c, g, or t
  misc_feature (36)..(36): n is a, c, g, or t
  misc_feature (45)..(45): n is a, c, g, or t
  misc_feature (78)..(78): n is a, c, g, or t
  misc_feature (104)..(104): n is a, c, g, or t
  misc_feature (160)..(160): n is a, c, g, or t
  misc_feature (183)..(183): n is a, c, g, or t
  misc_feature (219)..(219): n is a, c, g, or t
  misc_feature (260)..(260): n is a, c, g, or t
  misc_feature (271)..(271): n is a, c, g, or t
  misc_feature (314)..(314): n is a, c, g, or t
  misc_feature (335)..(335): n is a, c, g, or t
  misc_feature (337)..(338): n is a, c, g, or t
  misc_feature (342)..(342): n is a, c, g, or t
  misc_feature (345)..(345): n is a, c, g, or t
  misc_feature (356)..(356): n is a, c, g, or t
  misc_feature (368)..(368): n is a, c, g, or t
  misc_feature (386)..(386): n is a, c, g, or t
  misc_feature (390)..(390): n is a, c, g, or t
  misc_feature (400)..(400): n is a, c, g, or t
  misc_feature (405)..(405): n is a, c, g, or t
  misc_feature (430)..(430): n is a, c, g, or t
  misc_feature (434)..(434): n is a, c, g, or t
  misc_feature (439)..(439): n is a, c, g, or t
  misc_feature (457)..(457): n is a, c, g, or t
  misc_feature (480)..(481): n is a, c, g, or t
  misc_feature (494)..(494): n is a, c, g, or t
  misc_feature (503)..(503): n is a, c, g, or t
  misc_feature (510)..(510): n is a, c, g, or t
  misc_feature (512)..(512): n is a, c, g, or t
  misc_feature (525)..(525): n is a, c, g, or t
  misc_feature (529)..(529): n is a, c, g, or t
  misc_feature (535)..(535): n is a, c, g, or t
  misc_feature (539)..(539): n is a, c, g, or t
  Coding DNA Sequence Number=SeqID_4575
gacgctgtgcgtacccgaaatatgatanaagganangacaacccngccgctgctacgcatcatcactcactcatcttncatattgacatatattgattgttgcntccgcgataactactacgaccaacgtactcgcagacacgacgtctagcgtgtattnacatcatgcacgctcctatgtgntatctacactaacacgcgtcacgacatttatatatnatctgatctgcgacgtgcagcgacggctgcgatgagcatgngcacagctccntgtatgtcacgcgcgtcacgcgctagtactgtggatagcggtngactactcaactagtcgtaangnngagnatnacgcattgcgncgacgtctgctngcgttgcgtgtgactgcngatncgctgctgantatcntcgtatatcatgttcggtactattntatncatanagcagtagacaaatgcancggacgacatcgtgctgtgcccnncgagcagcactangatgagggntcgggcngntgggatgatgttngttncgtganatangtagcgcatactcgaatttcagcat

SEQ ID NO: 14355 - DNA, 259 bp, Glycine max
  Coding DNA Sequence Number=SeqID_4576
agaagtacataattgcccacccagcttcaatcagggtcctcctttcatgaccaattagttcaaggagtacatactgcccccccaagtcttctagatgagaaaactatctgttattacactaaaactcttacttgaatgcatggtaacgcagaaaattaccccccgcattactctttaaaacctcttttatcttttccctatttggttctgcccccccttaatttaacaatcgcctgatcacggcgacagctaacctaac

SEQ ID NO: 14356 - DNA, 362 bp, Glycine max
  Coding DNA Sequence Number=SeqID_4577
tggtttcaatcatacacgcgttcgtcattgcatttagtggtagccgtcgcggaagaggagcggcccgtcttgctcgacctggagctcatgcggcgtccaacgcggagtatcagtccctcgccgtcgcgttgcttcagccggatacctgaatcctcttttctcttgtattgttcaggaatctttgagcagcgcacgtcatggtctggcgaggcgacgaccggacggaaccgtcgtcgcggcgattttttgctgtttgcggggcggtcggccgcgacaacgctcaacttcatggagtagacgtccggcgtcccgcgttcgggctctacgccggcggccatggaatacgacacatgcacgcgccg

SEQ ID NO: 14357 - DNA, 392 bp, Glycine max
  misc_feature (274)..(274): n is a, c, g, or t
  Coding DNA Sequence Number=SeqID_4578
gtctgatatatcatggcgccgttttcaacattcccttaaacatcaggttaaagatatgcgggatatcgagtatgtgcatttgtgttatgttacagacgcacttcacatatgtttcttatccaatgagacaaaaccagttgccaccataatcaaaagcatgcttcaacaagctttggagttccggtcatgttttaagagtcttaatgacctttcagaatcaacagttaatcagcttaatctgcattctcttataaacttctctcaggtggatgcnattaaaacgaggtttgagagtaacatcaaagatctgtatattttgcattcgaagtcttcaaagtatgaggagcttggtctttctcgcttctgggggtatctgaactacaatgagtatc

SEQ ID NO: 14358 - DNA, 558 bp, Glycine max
  misc_feature (46)..(46): n is a, c, g, or t
  misc_feature (107)..(107): n is a, c, g, or t
  misc_feature (176)..(176): n is a, c, g, or t
  misc_feature (244)..(244): n is a, c, g, or t
  misc_feature (249)..(249): n is a, c, g, or t
  misc_feature (263)..(263): n is a, c, g, or t
  misc_feature (276)..(276): n is a, c, g, or t
  misc_feature (304)..(304): n is a, c, g, or t
  misc_feature (325)..(325): n is a, c, g, or t
  misc_feature (364)..(364): n is a, c, g, or t
  misc_feature (370)..(371): n is a, c, g, or t
  misc_feature (380)..(380): n is a, c, g, or t
  misc_feature (399)..(399): n is a, c, g, or t
  misc_feature (419)..(419): n is a, c, g, or t
  misc_feature (430)..(430): n is a, c, g, or t
  misc_feature (433)..(433): n is a, c, g, or t
  misc_feature (435)..(436): n is a, c, g, or t
  misc_feature (443)..(443): n is a, c, g, or t
  misc_feature (454)..(454): n is a, c, g, or t
  misc_feature (490)..(490): n is a, c, g, or t
  misc_feature (503)..(503): n is a, c, g, or t
  misc_feature (514)..(514): n is a, c, g, or t
  Coding DNA Sequence Number=SeqID_4579
ctaaatcatcatcccacagatcagcacatctacgtgagtactgtgntattagtatagagctgcagatcgaactcgacgctctcacgctatatccacacctcgtcgtngacgcgtactcgaaatcgactcatactcacgcactgattcctgtagcttcgtctagtagtcagctctgnctggctgattgactatacgatattatcgtagaagagtaggactgtcagctgacgagcgagggactcgngcgancagtagcgaagtancgtgggagatgancgatggtgctaatcgcgtcgacgagagnagtgtgatatagtacgatatngttgtagtgatgttatggtgaagtgtagtacaataaaanaatatnnttcagattnatcatatgaactacatatncgcgctatactacgcactantcccagctaanttncnnacgagangcgtgacgcgncgctctgacgtcaccgtcatcccatcgtctgcagcnactctgcacgcangtacgatcagntcatatgactaactcgcattgatacgtcgtcgtcatttgcgtcg

SEQ ID NO: 14359 - DNA, 436 bp, Glycine max
  Coding DNA Sequence Number=SeqID_4580
aatatgaaccttctccatgaatcagacataaattccaaaaacaccagtttataatgcatgggaaacaattttgagtttacaattttgaaatatcattccttacggcattaatttcagatatactcatcattgaatcaagaattactggtattttggcaccattgatgtgagtctaggagagaaccttctctttatggtcgaactctgaattgccgatgtatagcaattactaggaagatgcactttttgtcttaatacttagaccaggacaggcacaaaacttagtagtgctttcatgttgtttggtacgagcaaacttccaaacttttcaatagaactgtttgatttataccagcaggctaatgggggggggcctacgtagctgagcgctagactgagcccagaagctgggggcgcgtattgcaccgaaatgcct

SEQ ID NO: 14360 - DNA, 590 bp, Glycine max
  Coding DNA Sequence Number=SeqID_4581
tggcatgtctggtgagccccaggcaatctctcttggcatggctcttgccattgctgaaggtgagcgaagatcatagagtacctttgagacagggaaggacttcttacaagatagcccagagtggttgagcatgaaaggaaagttggtctcaagaaagctcgtaaagcccctctaatattccaagcgtggaaggttcgggatgttaagatggatggttctggactttctttctttcttgtgtcactggaaatgagctagatttggagactagtgactgttttcgtttgtagttgtaggtttttcgggttaggggaatgtaaagagaaagtgaatagttttcgtagaagtatgtattggtaagcctgctctctgttttccgatctcgtgtttccttgatctgtatggaattgggaagtttaggtatgtacatatttgtctcttctttttacccccaaacaaaatcacatgttttacgatattgaaggtttctttttaagatctaaattttgagagcgtgtaatagacaattcttagggctatttgtagtttggtttgcaatgttggtatattggtttgtgtgaagggtttct

SEQ ID NO: 14361 - DNA, 460 bp, Glycine max
  misc_feature (67)..(67): n is a, c, g, or t
  misc_feature (216)..(216): n is a, c, g, or t
  misc_feature (248)..(248): n is a, c, g, or t
  misc_feature (322)..(322): n is a, c, g, or t
  Coding DNA Sequence Number=SeqID_4582
gaatggcgcagatggagtactagaagcgacagcgagccacgacgcgcgacgcgctccgccatgtttnactcctctctcatatatgtctgtgtatcgatgcttacactgtgtactcagtatgcgactcagacagcgccacccgcacacactcactctggtgcacgcatcctcgcgccgctgctcgtcgtgccgagtcggacagcggatgtgcgctanctgtgtatacgacagatgatctacagacaccntatatacgctataattactgtcacgagaccgatgatatgggttatcttattatctacactggcgatgagcacgnaagtgcactcggtgtgtgctggtcacacctacgcattcatactctctttactcacaatatatgtatctaatgttgatatacaataacgacgcaggacattagtgatcgatccatatcgtgcgtactagacaacgtgat

SEQ ID NO: 14362 - DNA, 573 bp, Glycine max
  misc_feature (381)..(381): n is a, c, g, or t
  misc_feature (409)..(409): n is a, c, g, or t
  misc_feature (515)..(515): n is a, c, g, or t
  misc_feature (537)..(537): n is a, c, g, or t
  Coding DNA Sequence Number=SeqID_4583
gccgaccacaagtctctacgtaagagaaccgcagaaccggctaccgcgacaccaccgctgcgctcataagatgatcttatagtctgtcgcgtctacatttcattatttgctcatatcgtgtggttatgctgataaatgatcagtagtaaatatctcatatgatagataagttatactatcatgcgcttgtgccactgctctagcgcgtgtagtagtgtgagcctcatcgcccgaggtgtggtgagtaggtgattccgggagcctgttgtgtagttatgctcttgttcgtagtctatcgtcgtacatgcggtgtgtgtgtgcgagatgttcttgtaggagggaggtcccatcgcggtctcacctccttgacatgtagatacngttatatgtagaaattatgacgatacanatgtgctcaagagcacacatatataatcacactgatgctccgtagatacagtaaatatcgagcgacgtgagatgtataacgtggtgtatgatacacacgcgcctantgatccataacagcgtgatgtntctcactgataaaacgtgaagcacagccgacgcata

SEQ ID NO: 14363 - DNA, 210 bp, Glycine max
  Coding DNA Sequence Number=SeqID_4584
aatgctctacttgacaagatcagcccgcactgcctttgaagattttttttccgtgtcgtgccaacaaggcataaggaagaaagggtgttgttacacccccccccccggaggcggtgccggcgcggcgcccgcggccccgcccccacacaacacacggaagcggcgcgggggggaacccccggacagaaacaaaccagcaagccgtccgcg

SEQ ID NO: 14364 - DNA, 183 bp, Glycine max
  Coding DNA Sequence Number=SeqID_4585
gggtttgcattccaacctgcttgtcctacgcaagtgcacctgaattactgaactatgaactatagcaactgatatagcaagcagctactgaaagtgcaatttcacagcgtgcaatacatgcagagttcaggttcaagttcgcaccatactatgaatccagaacacagtacacaaagcagacgt

SEQ ID NO: 14365 - DNA, 594 bp, Glycine max
  misc_feature (28)..(28): n is a, c, g, or t
  misc_feature (36)..(36): n is a, c, g, or t
  misc_feature (89)..(89): n is a, c, g, or t
  misc_feature (158)..(158): n is a, c, g, or t
  misc_feature (187)..(187): n is a, c, g, or t
  misc_feature (204)..(204): n is a, c, g, or t
  misc_feature (226)..(226): n is a, c, g, or t
  misc_feature (239)..(239): n is a, c, g, or t
  misc_feature (242)..(242): n is a, c, g, or t
  misc_feature (244)..(244): n is a, c, g, or t
  misc_feature (259)..(259): n is a, c, g, or t
  misc_feature (291)..(291): n is a, c, g, or t
  misc_feature (313)..(313): n is a, c, g, or t
  misc_feature (315)..(315): n is a, c, g, or t
  misc_feature (320)..(320): n is a, c, g, or t
  misc_feature (323)..(323): n is a, c, g, or t
  misc_feature (340)..(340): n is a, c, g, or t
  misc_feature (383)..(383): n is a, c, g, or t
  misc_feature (396)..(396): n is a, c, g, or t
  misc_feature (420)..(420): n is a, c, g, or t
  misc_feature (448)..(448): n is a, c, g, or t
  misc_feature (469)..(469): n is a, c, g, or t
  misc_feature (476)..(476): n is a, c, g, or t
  misc_feature (529)..(529): n is a, c, g, or t
  misc_feature (557)..(557): n is a, c, g, or t
  Coding DNA Sequence Number=SeqID_4586
atcgtagcggatacacgtgtcgtcgctntattagtnatttatctcggattcattgcgttgatctgatgtcatatcgataatgtgtgtcnatactactcgacaatctactacgtcgatctcttcttacggtcgtacacatacgagatatgatgacggancacatagtcgtacggtcgcacgactcgcngccgagagagcagtcangatcgactcgcgaccgcgcccntcacgcgtgcacntgnantgagagcatcactgntacagatagcgtgtgctgtcttcgaatctgcntgagcgtatcgacacgactacntncatcnctncgctcgagctacagtantatcgaccaagcaagcagcacacagatgcacaccgactcaatntcaggactgacgnacacgatatgtgatatgcagtgtngatggacgtatcactgcagtcatcgcancatacatatatactgaccganctcgatncgctagtgacattcacagatgtgatacgtactcgtcatacagcatgacgtcgngcgcgatatacgtcagcatagcagatcntctgctagcgatgatggactgtactggccgatactga

SEQ ID NO: 14366 - DNA, 578 bp, Glycine max
  Coding DNA Sequence Number=SeqID_4587
gttttccagacactgcgatgtcgaaagcaattcttctggttgctctctgctttttaccggctctagccatgtctgctcgtccgaacaagaaccctttcgtcgtcagaggccgtgtctattgcgatacttgcctcgctggttttgaaacttcagcatctactttcatccctggtgcggtggttagattggagtgcaaagacaggagaacaatggagttaacctacaggcacgaggcgagaaccgactcaacaggatcgtacaagatcttggttagcgaagaccatgaggatcagttctgtgataccatgttggttagtagctctcagttacgctgctccaatgtctcacctggtcatgaccgtgcccgtgtgaccctcactcgtttcaacggcattgcttcagacgaacgtttcgctaacaacttgggcttcctaagggatgcagcatcaccaggctgtgcagagatcatgaagcaatatcaagaaactgaagactaaaatgctcaatcagtatgtttttatcagtgttcccccgacatgtgggattaaaattataattgcagcttgtgtttcgtgcat

SEQ ID NO: 14367 - DNA, 427 bp, Glycine max
  Coding DNA Sequence Number=SeqID_4588
atggcatcgccagctaaagaaaggtgtcatggtgtkgttcaaacttmragtggygtgtggaatagaagaatcccaattcccaaccatattatttgtcacgcttggtacaggggaaatacgacaacatcatcgcggcggtgaagagctactacatgtcgatgagcggtacactaccaatagtgtcggtgaagagctaccaatctgaatgaatggtttcaagtgtgagagtgagcaatgagcttggtgcaagacacccaaaatatgcttatttctcagtgtgggcagtgactgcaatctctatactaatatttatcattcttgccattgtgatcctctacctgtgcaactacaccagctacatgttgcatgttcacatatgcacttttgtattagtaatatctcttgtatagtgcttttctcctcttta

SEQ ID NO: 14368 - DNA, 528 bp, Glycine max
  misc_feature (50)..(50): n is a, c, g, or t
  misc_feature (55)..(55): n is a, c, g, or t
  misc_feature (58)..(58): n is a, c, g, or t
  misc_feature (62)..(62): n is a, c, g, or t
  misc_feature (87)..(87): n is a, c, g, or t
  misc_feature (158)..(158): n is a, c, g, or t
  misc_feature (192)..(192): n is a, c, g, or t
  misc_feature (255)..(255): n is a, c, g, or t
  misc_feature (280)..(282): n is a, c, g, or t
  misc_feature (285)..(285): n is a, c, g, or t
  misc_feature (287)..(287): n is a, c, g, or t
  misc_feature (289)..(289): n is a, c, g, or t
  misc_feature (307)..(307): n is a, c, g, or t
  misc_feature (342)..(342): n is a, c, g, or t
  misc_feature (362)..(362): n is a, c, g, or t
  misc_feature (376)..(376): n is a, c, g, or t
  misc_feature (380)..(381): n is a, c, g, or t
  misc_feature (419)..(419): n is a, c, g, or t
  misc_feature (434)..(434): n is a, c, g, or t
  misc_feature (469)..(469): n is a, c, g, or t
  misc_feature (472)..(472): n is a, c, g, or t
  misc_feature (474)..(474): n is a, c, g, or t
  Coding DNA Sequence Number=SeqID_4589
tatagctctccacactcatgtatcaccatctgccgacaacgacagaaggnagttnttngtgngtgtcgtgtgcacgaactagcccgnatgctgcgtacatcacaccacaacgacctgcaagtagatacacctaaacacattatatgatatcatctgtnagtctagtcgctgatctcgatctatacgatcgtntgaggtgtgatacgacgagatggtgaacaaatacgagacacgattgcacgctactacctagcntgcgctcatacgagacactacttgnnngtntncncgctccctcacctccgtnactacgacggcgtgacagactcgacatacgatctntatctcacagaatgagactntctacgtcactatntatnnctgtcatatcatccactgcactcgacgcgtagcgttcngcggtctgcgcacanaccctagtcttcacgacgccgcgctcatactgtgnggngngcgccactgctactcgtcgagtatctaccacatgctccacctgcgtacaggctg

SEQ ID NO: 14369 - DNA, 557 bp, Glycine max
  misc_feature (218)..(218): n is a, c, g, or t
  misc_feature (324)..(324): n is a, c, g, or t
  misc_feature (384)..(384): n is a, c, g, or t
  misc_feature (483)..(483): n is a, c, g, or t
  Coding DNA Sequence Number=SeqID_4590
acagactgacgactgcagactcgacgcagaggatcgccgacctcgactacgtcgctcggctgctgacggtggcgcgcggagcgtataacgatgtatgtcgaggagaatgcacaacaactctatcgctcacgcacacgcgctatcaacgcggtagtgagcgctcctccaccgcgcaccctccaccgcgccgctgcgcgcgcgcaatcgcgtgacatagncgcgcgcgcgcccgccgcgacagcatcggacgtcacagcgaacctgtgcgacgcatcgcgcagccatggtcgaccggtggctcaactagagaacgatacacgcgtncgagatgcgagagtgtgtacgacgacccgtcacacgcacgactgacgtgtgtgatcgtcncgcgtgccggtagcgcatcgcagcagagatgtgtatgctacggcgcgatgcgcatgggtcgcctgtcctgtcgtaccgcgtagctaatcctcatcgtcncgagtgtaggctaggagcgtcggcactaagacgtgacggagcgcgcgcgacgtatctacgtctactgatctcta

SEQ ID NO: 14370 - DNA, 578 bp, Glycine max
  misc_feature (89)..(89): n is a, c, g, or t
  misc_feature (138)..(138): n is a, c, g, or t
  misc_feature (186)..(186): n is a, c, g, or t
  misc_feature (237)..(237): n is a, c, g, or t
  misc_feature (390)..(390): n is a, c, g, or t
  misc_feature (458)..(458): n is a, c, g, or t
  misc_feature (551)..(551): n is a, c, g, or t
  Coding DNA Sequence Number=SeqID_4591
acaccccttgagaacttaattggatgtgagcgcccaccctacgacgccagcgctcgcactgcgaggacaataaacacatagtgtgagangttatgatggcgtgggtggtggtattgttgtgagacacacacacaaagntgacggggcgagataatataacgtggggcgtgtgtgctagcgagcaanatcatgtgtatgacatagaactgtgtcaagaggcctcagaccgcaccgcanatagtgagaaactcattaacatatgtgcgtgtgtatatactaatcggtgattcgtcgcgggtgtctataatagtgctgcgatagatatatcatgcgtctcggcgttgctggcgtgcgcggacatcgtgacaatatcaaatacatacttacacnacgattgcgctgtgctagattctacgcgcgccgctactatctagctgtgacgtccggatattgataangcgcggcgcggcgccgtgggagataatatgagatgagataaaggcggacgctgcgagtatagcgtgctctaccggcgaatgtactctctgacnagtcgtgaatcacgtgggccgcgcgat

SEQ ID NO: 14371 - DNA, 439 bp, Glycine max
  Coding DNA Sequence Number=SeqID_4592
ggaggtcatcctatatcggtttgttatttgttgatgacatcgtcagtgtccgtcctatagtagtcgtcgtatgcataaattcttcgtcgttttttcctagcagccgtcgttgttttcattatttcgagggcgggtttttcctaacaatagtcgttgttttcattatttcaatgacggggtatttcgtaacagctgtcgttgtttggattatttcaacgttcgtggatttcgtaaaagcttatcgttgcagggattaatttcaatgtcatggtatattgaagaccgtcgttgtttttgttaatttcaacgtcggggtgtgaggatgaccatcgttgtatggggttaatttcaacgtcggggttttaaggcgcgtcatagaaatgggaataagataatgacgggtgcctatttgacagtcgttgaatgatattccctgtga

SEQ ID NO: 14372 - DNA, 574 bp, Glycine max
  misc_feature (87)..(87): n is a, c, g, or t
  misc_feature (116)..(116): n is a, c, g, or t
  misc_feature (141)..(141): n is a, c, g, or t
  misc_feature (264)..(264): n is a, c, g, or t
  misc_feature (408)..(408): n is a, c, g, or t
  misc_feature (416)..(416): n is a, c, g, or t
  misc_feature (435)..(435): n is a, c, g, or t
  misc_feature (540)..(540): n is a, c, g, or t
  Coding DNA Sequence Number=SeqID_4593
agttcctgtgtagtgtgtgcacgccgctcgagactgtcgattgacgaggtattaggcctcgatcatctatcctattgtctgtctatnggcttagtgtactttcgtttatcattgtnatttcaaatctatgatgtcgtaccnatgcgagtgggcggcgcttctctgagcgtcgatgcccacatgctgctctttcaatctcttattattttgcactcaacaatgcctgtctctcctcgcctctgcgatccgccacacaccgtcccntacacactcctgagtatggatcttcaccggcgcacacacatcggcgcaacgccgacgcttctgccgcggcccgacgcctagatcgctatatcgtcaggtgcgaggtgagatctcgccgcgctctgtgtttagtgtggggagatnaccacccngtgcgccacgcgcgccagnatgcactcatcacgcagtctttatgtgtattctatatatcatatatcatattattacttctatctatatacattattcgcgacttcaaacagtcagagacacagnacacctcatcttactaactgtgtgtctactctct

SEQ ID NO: 14373 - DNA, 598 bp, Glycine max
  Coding DNA Sequence Number=SeqID_4594
gagcaccgagggttaaatgcacccaactccctatcctgcataaaaaaccaatgttcaatttgaatagggggggaaaccccccccctaattaaactttcaaaggggggaattgtttttttctttcctccccccgggtttgaactgaactctttaacacttttttcaaaaacccccaggggaaaaaaagggtttaacaattttttccaggaatattcccccacttggtttgtaaggaaattccctggccccaattctgaacccccaccccccaaagggtgttttatttaaaggggcaccccccccttatggttgggcaaaaaataaatttttctggagaaaggggggggtttgaacccctaaaacccccctttgaaaagggcctcctggataaactccccttccctcttctggggaaccaaaaaagggcccctaaaaatacctttcctcacgtggcttttcccccccaaaagttccccggaatttttccgggggggagaacttcccctgggcctttgaaggcccgcggcaaataatgggaaatgttctcagaaaacccggtgtttaataccccctattattgtgtgttcccattataacg

SEQ ID NO: 14374 - DNA, 561 bp, Glycine max
  Coding DNA Sequence Number=SeqID_4595
gtatttctcttctttttcgcttagaaccaagaagcgtcgaacaagatggaatgaagttttccatattaacaatatctatatatattgaattcaagttattattcattatgtaccattctagtctactccatttcaatctattcaatctcctctcttcccatcaagtcaagtattagcagcactatgacagtcgtatcatcgatctttctgattggtttcatatcagtccaatttttatgaatatatatatgtctttgcggaatacccagcccaatacgtcagaattggtaggtaacaacgttcgctgacaacagagccgcctaagggtatgttcattcacaagttgaaaacaatttctactttttccgaagaaaaaatcacataaataacaaaattgtggcttttaagttttatgactttgggattatgctaagtccattaaaaagggttaaactaacatgcacgaaatgtaatggtggaaatatgaagacagaaccgggttttgtttcttatctaatttagggggagtgattgaagcctatcctcttcccatcttaaata

SEQ ID NO: 14375 - DNA, 309 bp, Glycine max
  misc_feature (26)..(26): n is a, c, g, or t
  misc_feature (28)..(28): n is a, c, g, or t
  misc_feature (33)..(33): n is a, c, g, or t
  misc_feature (116)..(116): n is a, c, g, or t
  misc_feature (120)..(120): n is a, c, g, or t
  misc_feature (124)..(124): n is a, c, g, or t
  misc_feature (137)..(137): n is a, c, g, or t
  misc_feature (140)..(140): n is a, c, g, or t
  misc_feature (144)..(144): n is a, c, g, or t
  misc_feature (150)..(150): n is a, c, g, or t
  misc_feature (154)..(154): n is a, c, g, or t
  misc_feature (180)..(180): n is a, c, g, or t
  misc_feature (213)..(214): n is a, c, g, or t
  misc_feature (221)..(222): n is a, c, g, or t
  misc_feature (227)..(227): n is a, c, g, or t
  misc_feature (229)..(229): n is a, c, g, or t
  misc_feature (231)..(231): n is a, c, g, or t
  misc_feature (236)..(236): n is a, c, g, or t
  misc_feature (241)..(241): n is a, c, g, or t
  misc_feature (252)..(252): n is a, c, g, or t
  misc_feature (256)..(256): n is a, c, g, or t
  misc_feature (268)..(268): n is a, c, g, or t
  Coding DNA Sequence Number=SeqID_4596
tcttctatctctgcaattcaaacacnanaaccntggcttccactaatgatcttcctcccaccggataacggacctcatcgtgagcttcggcgagatgctcatcgacttcgttcccnccgnctcnggcgggtccctcntgnaggntccggnattnctcaaggcccccggcggggcccccgncaacgttgccatcgccgtcgcgagactcggcgnnaaagcgnngttcntngntaagntcggngacgacgaggncggnacacatgctggncggaatcctgaaggagaacgtatggcgaatacgacgtggat

SEQ ID NO: 14376 - DNA, 524 bp, Glycine max
  misc_feature (46)..(48): n is a, c, g, or t
  misc_feature (97)..(97): n is a, c, g, or t
  misc_feature (178)..(178): n is a, c, g, or t
  misc_feature (180)..(180): n is a, c, g, or t
  misc_feature (257)..(257): n is a, c, g, or t
  misc_feature (274)..(274): n is a, c, g, or t
  misc_feature (308)..(308): n is a, c, g, or t
  misc_feature (410)..(410): n is a, c, g, or t
  misc_feature (449)..(449): n is a, c, g, or t
  misc_feature (476)..(476): n is a, c, g, or t
  misc_feature (483)..(483): n is a, c, g, or t
  Coding DNA Sequence Number=SeqID_4597
gtgttggtgtggtgtctctctctcccccccacccctactacccccnnnacaaccgaggaggatattattacaacattattaattatactcttttcantcgattctgcggatgtcgccgccacgtggcagttatgtactcaatataataaaagatgggtgcgcgcgtgctgaaaatcancncgcgggagctcgctcaccgagaagcgcgcgctctcgacgacgacgcttggcggtcgtgggcgcatcttgaccagatnaaactcactcacactcncgttcgcatcctctcatgcatacttcgcacgcgncgcctcgagtgtgatatatatcatcgcagcgctgctgcgacgcctgtcaccatccctaacaccttactcgcttcttatctgtttgtgattcacacacacccnactgcacgactcatatctatctatctactccgccgctcntgttgtgacgcctcgtttcacgctgtntattacnacttagcacccgtgcgctgcgtgctcgcgatgaactacatc

SEQ ID NO: 14377 - DNA, 560 bp, Glycine max
  misc_feature (69)..(69): n is a, c, g, or t
  misc_feature (183)..(183): n is a, c, g, or t
  misc_feature (185)..(185): n is a, c, g, or t
  misc_feature (420)..(420): n is a, c, g, or t
  misc_feature (456)..(456): n is a, c, g, or t
  misc_feature (458)..(458): n is a, c, g, or t
  misc_feature (476)..(476): n is a, c, g, or t
  misc_feature (478)..(478): n is a, c, g, or t
  misc_feature (481)..(486): n is a, c, g, or t
  misc_feature (499)..(500): n is a, c, g, or t
  misc_feature (503)..(503): n is a, c, g, or t
  misc_feature (521)..(521): n is a, c, g, or t
  misc_feature (524)..(525): n is a, c, g, or t
  Coding DNA Sequence Number=SeqID_4598
tgtatagcatatagcgatctcgtgagtagatatgaagagtagcaaaatacgagtgaagagatgtatgangacatgcagtagtagacatagggtggatataagtctggcgatgttatagtcagtttgtcagacatatgacatgtctttgagagtgtagtgtgtgtgtgctcatatattacattntnaggtagggttgatactatacgctccagtccctgcaacgagccgcggtgctgagagaggcgtgtgtgactagctacgtatgtgcaggtatataatgattacatggtgttcgatattgttaatcatgattacattatcatatcctctgatccacattattctatatcacaacacacatagtatgagagatgatatcaatttaagtagatattgatatgagcaggagtagataatagnagtaacagtagtggagagttgggtagtatatatgangngctgcgagtgggcgtggnanttnnnnnnatcaggaggggtnntanaatattactctacattancanntatctcccacaaatacgtcttgtcgtggtagggtg

SEQ ID NO: 14378 - DNA, 483 bp, Glycine max
  misc_feature (140)..(140): n is a, c, g, or t
  misc_feature (184)..(184): n is a, c, g, or t
  misc_feature (207)..(207): n is a, c, g, or t
  misc_feature (380)..(380): n is a, c, g, or t
  misc_feature (412)..(412): n is a, c, g, or t
  Coding DNA Sequence Number=SeqID_4599
ggacgcggacgcttcagtctgatcacgcacgagcgcagactgacacgtacagaactgagtagagacgtgctcacttctgtgataggtgtcagcggcccgctagtgtagttgtgagcaagtatatgtagcgcctttcggtncgcttctcactgataactagctctgatagtagagcataatttgntcgtataataggagattatacanatatactgctagctatctagacgagacagcgatagatcgtcgtcgcgccactcggatggcgcgagaacaatagtcggacggtggaggtgtgggcgtgcgacgtagctcacagaggaggcatactataagcaggtctgtggatgaagttttcatgtcgggcggagagagcacgngtatctgcgtgactaggagtgtgtgtgtgttngatgttaggagaaggtcgtgctgtcatgtgcgcggcggatcctccggcagttcttgctctactatttgcga

SEQ ID NO: 14379 - DNA, 313 bp, Glycine max
  Coding DNA Sequence Number=SeqID_4600
cattcgggatgtggccgtcttgtcctcctgtcgcttctcagggatgcactttgcgctgttactagtgctgactggtccgggctttctggctcatccttctgtttccggggttgtcgcctgtattctccaccgacctgtggtctcatgtatggcccttctggcgccgttttttcgcattttctccccgtcttcattgggttgcccggggggcccttttggcgaccctggtcggctccttctcccagtctgaccagggatgctataagttcccacctcattggctcatttccatcatgttctatcatctagtcag

SEQ ID NO: 14380 - DNA, 444 bp, Glycine max
  misc_feature (116)..(116): n is a, c, g, or t
  misc_feature (199)..(199): n is a, c, g, or t
  misc_feature (246)..(246): n is a, c, g, or t
  misc_feature (296)..(296): n is a, c, g, or t
  misc_feature (298)..(298): n is a, c, g, or t
  misc_feature (329)..(330): n is a, c, g, or t
  misc_feature (337)..(337): n is a, c, g, or t
  misc_feature (343)..(343): n is a, c, g, or t
  misc_feature (351)..(351): n is a, c, g, or t
  misc_feature (374)..(374): n is a, c, g, or t
  Coding DNA Sequence Number=SeqID_4601
tctctcgtatagtcgttctttttggattccgactgttgtagtgttgttatgtctcgttcgtgtattagaatgtttgttaaacgatgccgcgcgcatccacgcacagcggcgaacantacatcgctgatactgagagtagcgcgagcgtcgcagatcggcggcgcgcgtgcgaagcctgagagtgtgtatgttactgctntcgtaagtgttactagtgatttgtttctattcccgcaactggtaggnatgatacaaatcgagtgatgttgtgggcgttctgcggtatatctggtatntnttcctgctgcccggacctatgtgtattatannatgtgtncttgtnctatcttnttggaggcgatatacaacccatncctctctcgtgcctcctgctaagtatacgtacaatattgacaatacaatacctatccctgtgtgaaagag

SEQ ID NO: 14381 - DNA, 386 bp, Glycine max
  Coding DNA Sequence Number=SeqID_4602
atccttcgagaagattcacatcattttcccagttatggattggcaaggacagaaactagcggagcagctgatgcagatactgctcttgatcgccgccgtcgtggcgttcgtcgttggttacacgacggcgtcgtttaggacgatgatgttgatttacgcgggaggcgttggtgtcgcgacgttgatcacggtgccaaactggccattcttcaaccgtcatccactcaagtggttggatccaagtgaagcggagaagcatcctaaaccggaagtcgatgttagctcgaagaagaagtcatctaaaaagtagcacaatcttcttttgtaatctctcttatttttctagacctttgatataaaaaaagacatgttctggattttgctta

SEQ ID NO: 14382 - DNA, 335 bp, Glycine max
  misc_feature (280)..(280): n is a, c, g, or t
  misc_feature (290)..(290): n is a, c, g, or t
  Coding DNA Sequence Number=SeqID_4603
caattatgaatgtaaccctgacgatacatgtggcacatattatatattgaccgacataacagcatttggtcgaataatagcatgcccaacaggaaatgaaagataccctctcactgcggtgcaatctcgcaatgagctcgacacagggattggaacaatcatctcgtgcccatttcgaatccgttttatcgccgaaggcaatcctttgagacttaagatcgattcattagcagttataatgctgtgtgttggaattactaccgagtggtctgttgtggangatctaccanaaagaccctgctgtcaaaattgtgagaaacaagatgcagcggatg

SEQ ID NO: 14383 - DNA, 594 bp, Glycine max
  misc_feature (32)..(32): n is a, c, g, or t
  misc_feature (84)..(84): n is a, c, g, or t
  misc_feature (87)..(88): n is a, c, g, or t
  misc_feature (90)..(90): n is a, c, g, or t
  misc_feature (100)..(100): n is a, c, g, or t
  misc_feature (165)..(165): n is a, c, g, or t
  misc_feature (167)..(170): n is a, c, g, or t
  misc_feature (172)..(172): n is a, c, g, or t
  misc_feature (180)..(180): n is a, c, g, or t
  misc_feature (262)..(262): n is a, c, g, or t
  misc_feature (269)..(269): n is a, c, g, or t
  misc_feature (273)..(273): n is a, c, g, or t
  misc_feature (280)..(280): n is a, c, g, or t
  misc_feature (327)..(330): n is a, c, g, or t
  misc_feature (396)..(396): n is a, c, g, or t
  misc_feature (429)..(429): n is a, c, g, or t
  misc_feature (435)..(435): n is a, c, g, or t
  misc_feature (482)..(482): n is a, c, g, or t
  Coding DNA Sequence Number=SeqID_4604
atgtatgtcatggagtcgtacgtgaagtatangtacggattactaatctacaacacgctatctcgcagcactcgacgatctgtngtnntntcgcgccccnactgacggtgacgacgcattgactggagtcggaggatcgtgacgacgcacaggcatgtctccacnannnncntgcatagngacgcttgagatgcgacatgagcagctatcacttctatataactcaatacgtcgattcaaggcgcgtgagcgagatgagtgngatcgancgangtgtgancgttacactagtgggtaatgacactcgtatacacgtgttgctcgctnnnncgtgtgtctcgagaccgatatcgactatgtagatgtatcgctaacgctatcttatatgatcagaancacgactgaggccacgtctcagcataatactangtaganatgatggtgtgtacgtctagttagagaaactactcaatacgacgcantatgtgatatgcgccattgatgatgagttagcgtacatccagatactatactactcacagtgatagacgtgtacatctctgagtagacgtatacatcgctcaatcgtcagac

SEQ ID NO: 14384 - DNA, 454 bp, Glycine max
  misc_feature (89)..(89): n is a, c, g, or t
  misc_feature (101)..(101): n is a, c, g, or t
  misc_feature (157)..(157): n is a, c, g, or t
  misc_feature (191)..(191): n is a, c, g, or t
  misc_feature (258)..(258): n is a, c, g, or t
  misc_feature (262)..(262): n is a, c, g, or t
  misc_feature (284)..(285): n is a, c, g, or t
  Coding DNA Sequence Number=SeqID_4605
atcctatctatatatttgtcctacgctcactcgtctctctctctcatattctccttcccctttctccgttccctcactctgcctcttcntcctcgctcacnacaactcacattcttcgcctcatcgacatacgtgccatgcctgtctccttctacgnagcgctggcagaccgtctatacgccactacaccntgttccgagcgcgtctcacaaataatagactcaatattggcaatacaaacacacacatatattaagntatnctctctatcactatcacctatnnatatatatataactaaaactacaccacttctagtgtacggagattagagaaacaggactatattaaaactacaaaacacaacacatacctacccttcaagtatacgaacgaacacattatatcgatagaagaaactcaccacggaacacatgaaagaaccagaccaagc

SEQ ID NO: 14385 - DNA, 413 bp, Glycine max
  Coding DNA Sequence Number=SeqID_4606
actcgattaattcctcacagtcacaggattctcatctgagaagctatgggttggaaagctgctgagaaactcatcagacattggaagatacttcgtggagataatgtaatgataatccgcgggaaagataagggtgagactggaaccattaagcgtgtcatcagatcccagaaccgcgtcattgttgaaggaaagaatctgatcaagaagcatataaagggaggccctgatcatgaaggagggattttcacggtagaggctcctcttcacgcctcaaatgtccaagttgttgatcccgtcactgggaggccttgtaaggttggtgtaaagtacctagaggatggaacaaaagtaagagttgccagaggcacaggcacctctggttccataatccctcgtccagagattctgaa

SEQ ID NO: 14386 - DNA, 568 bp, Glycine max
  misc_feature (179)..(179): n is a, c, g, or t
  misc_feature (242)..(242): n is a, c, g, or t
  misc_feature (263)..(263): n is a, c, g, or t
  misc_feature (289)..(289): n is a, c, g, or t
  misc_feature (293)..(293): n is a, c, g, or t
  misc_feature (332)..(332): n is a, c, g, or t
  misc_feature (338)..(338): n is a, c, g, or t
  misc_feature (341)..(341): n is a, c, g, or t
  misc_feature (353)..(353): n is a, c, g, or t
  misc_feature (355)..(355): n is a, c, g, or t
  misc_feature (357)..(359): n is a, c, g, or t
  misc_feature (367)..(367): n is a, c, g, or t
  misc_feature (403)..(403): n is a, c, g, or t
  misc_feature (410)..(410): n is a, c, g, or t
  misc_feature (415)..(415): n is a, c, g, or t
  misc_feature (419)..(420): n is a, c, g, or t
  misc_feature (426)..(429): n is a, c, g, or t
  misc_feature (478)..(478): n is a, c, g, or t
  misc_feature (501)..(501): n is a, c, g, or t
  misc_feature (524)..(524): n is a, c, g, or t
  misc_feature (531)..(531): n is a, c, g, or t
  Coding DNA Sequence Number=SeqID_4607
ttctcgtccgatttcactagtgcgcgccgtcggctgtaacagtgacctccgcctagcgatgcgccgcgcacaacacgactgacataccaccactcgcatcgtcatatgactacacacgattcactgctgcagcgcaagtgagtacactactatagacgcaagctctctgtatatatatnagatatatatcatcaatccctacgtcatctagacgtcgtagaatagaaagtacaatactaatncacacgatatctatacataantctaataactcatatgccaaacacanaacntatacatcactcgcgcgccctcgtaccacaccacctcancgacangcnttcactccgggngngnnngggggggntggggggggatgaggcaccgcccgggggggcggggnggggccncactnttcnnctcggnnnncgtctatatgtgatgctctgttcgtgcgcctccgctgaccctatcattnacgtcatgatatctaacttctcnacatgattctgagtaataaaacngactatngtcgtctcactcgaatttcatacagctgcctgatctg

SEQ ID NO: 14387 - DNA, 543 bp, Glycine max
  misc_feature (194)..(194): n is a, c, g, or t
  misc_feature (265)..(265): n is a, c, g, or t
  misc_feature (482)..(482): n is a, c, g, or t
  Coding DNA Sequence Number=SeqID_4608
tccacttacgtcatcagaggtcatagatcttgttgtgcggagttactggtaattgtgaggtctagtgctgtagctgctcgttcagatccatgttcgtcgtatcaactagcagctgcgctagcgcctcttccatccattctctttcgtagatacgtttctactatctatatgagtctcatgttcatcgttcgagnatatgcgctgtccgcacggtgtaagctagttgcgtagccgaaggatagtagctatagtatgatctgtgatnagagttaagactcatatatcatatactactaatgtatcgcgggcacactgcgctcatcagcgcggcgcgcggtgtgccgtatcttcgtctcggtggtgctatgcagtgcgtttttgtgtcttgtttggtcatgtggtatccattctcgactctataaagataagagaagagatgataggctttatggcgctgtatctattgcgggctcgcgcagcgnggggcggcgcgcggtacccttcactttcgatttcatgcatggcatctgtgtatattggttg

SEQ ID NO: 14388 - DNA, 559 bp, Glycine max
  misc_feature (85)..(85): n is a, c, g, or t
  misc_feature (117)..(117): n is a, c, g, or t
  misc_feature (150)..(150): n is a, c, g, or t
  misc_feature (158)..(158): n is a, c, g, or t
  misc_feature (198)..(198): n is a, c, g, or t
  misc_feature (225)..(225): n is a, c, g, or t
  misc_feature (251)..(251): n is a, c, g, or t
  misc_feature (292)..(292): n is a, c, g, or t
  misc_feature (297)..(297): n is a, c, g, or t
  misc_feature (313)..(313): n is a, c, g, or t
  misc_feature (325)..(325): n is a, c, g, or t
  misc_feature (347)..(347): n is a, c, g, or t
  misc_feature (349)..(349): n is a, c, g, or t
  misc_feature (356)..(356): n is a, c, g, or t
  misc_feature (361)..(362): n is a, c, g, or t
  misc_feature (366)..(366): n is a, c, g, or t
  misc_feature (368)..(368): n is a, c, g, or t
  misc_feature (404)..(404): n is a, c, g, or t
  misc_feature (483)..(483): n is a, c, g, or t
  misc_feature (490)..(490): n is a, c, g, or t
  misc_feature (501)..(502): n is a, c, g, or t
  misc_feature (504)..(507): n is a, c, g, or t
  misc_feature (509)..(509): n is a, c, g, or t
  misc_feature (525)..(526): n is a, c, g, or t
  misc_feature (534)..(534): n is a, c, g, or t
  Coding DNA Sequence Number=SeqID_4609
gctctatcttgcttagcgtgtgactatgttctcttctctctatttctctccttatagtgcttctcttctgtcgctctcctctcgncctactgctctcatgctccattctctacctcntactgtgcggctctcggcgatcgacgtgcggangagtgcancacgcggcgagagcgctgccggcctagtctcggatcgagngcctacaccctcctgtacaatctcatnggtatacgtcgtattcatatgtatgncttgatatcgatacgtcgtatgtctcgatacatttattatntattncatcagaatgtaatantatctactagtntccttaccgctcgctcatatcnancgcacgntgctnngcgngngtgatatggcagtacacgaggggagagacacattgnggaggcgaagctcgcgcgtcgcgcacgcagtgagagaagccgaacctcgtccactctcactcttatataacgcaacttncgccttngtccgcttttnntnnnntngttgtattaatataanntacattanctctccataagtgtcatccagatgg

SEQ ID NO: 14389 - DNA, 443 bp, Glycine max
  Coding DNA Sequence Number=SeqID_4610
ttataccaagctggcctgtcttgaaggtttatagggaccaaattgatcttgtcttttgtttcttgagtgtactgttgttggtggtgttgtttttttaatcagaattgtagttttacttcaataatctgcataataaaggtatacaagggattacgaagataaaactccaattctgattagagagcaacaccaataacacttaaagaattatctcacctcttggttttagttttgtttttgggaaaatggagtattcacaaatcactgcccttcaaactatctcaccttttgtttttttttcctttagccagattaggggttgttattgggacatcaatgcacattctctattttatccctactcaccctaacaattagtatgccctgctggttcacttctgatatattccttatcaatgtgattttagattttccttcatttt

SEQ ID NO: 14390 - DNA, 476 bp, Glycine max
  Coding DNA Sequence Number=SeqID_4611
ggcgccggtgcggagccttcgggagccggggccgacgcgggcacggcggcggccggtccggtcgccggtcccggggacggcgcgccgccaaagcgactgtgagccctcgcctcccctctgtccgccaggatgaccgtctttcagtcccctgccccactgccctcccctagtcttatgtaccccccgccgccccgccgccccgctagcccccatggctgcgaccgagctcccccgatctgattatcgtccactaaccctcagactttttctcctcctctccacccgcgtcctcgcccaacctcttccagtcccaatctcgcccctcactccatatttccactatccctctccatgccaatgcctccgtgacacactgagttgctcattacttgcctccttccatatgctatcttcgtctccctacgcagcctcttcccgctttcgacacctcgaccccagacgatcatcgatgtcca

SEQ ID NO: 14391 - DNA, 77 bp, Glycine max
  Coding DNA Sequence Number=SeqID_4612
accacttactctatcgccgtgtttgctcactgttccgattctgcgttagcctttcacataaccaatttcaaaggcct

SEQ ID NO: 14392 - DNA, 337 bp, Glycine max
  Coding DNA Sequence Number=SeqID_4613
atagacgcttctacatagctttcgtactatggtctgattccatgatacaatgacaataatcaggtgggattggctgacaaaaggattagaagggcaactggcaccgatttagacatattctaggctgctgatgattttactcgagccatatacaaatatgaaggtaaactaaggtctaatattttggttaccaaactcaccgtatatgacagtcaagctccacatgattgtgcaatacaatcaaattgccaatctagtaggagattctattctaagcaggtgtcaccaagagttccagcatgtatctatgttagtagcactgtttactacgagctga

SEQ ID NO: 14393 - DNA, 572 bp, Glycine max
  misc_feature (59)..(59): n is a, c, g, or t
  misc_feature (95)..(95): n is a, c, g, or t
  misc_feature (115)..(115): n is a, c, g, or t
  misc_feature (181)..(181): n is a, c, g, or t
  misc_feature (188)..(188): n is a, c, g, or t
  misc_feature (207)..(207): n is a, c, g, or t
  misc_feature (244)..(244): n is a, c, g, or t
  misc_feature (265)..(265): n is a, c, g, or t
  misc_feature (334)..(334): n is a, c, g, or t
  misc_feature (462)..(462): n is a, c, g, or t
  misc_feature (547)..(547): n is a, c, g, or t
  Coding DNA Sequence Number=SeqID_4614
tatgtatgcgagacgtacacgtgcagtactctctatctcacgcttcagctagcgatctngagcaggacatactactcagcactgtactacgacangatatagtgctagtgagctnctacgccatgctcactatgctcatcatactcgccagatgtctgatgatcatacgatacatgactcnctctcgncatcgactctatacgtacnacgcgatcacgtacgtcatagactcatcatgcacgcncgtgctggtctatcggcgagnactatgatcaacacgagccatgaagtactgagtagcacacagatatgtgcacatcgatatcactgctgncgcgcttcaaagaccgactactatactgctattataatgaatcaacatatacacgcagaactagagatagagatatacatgacatacactacataaactagtacatgactactactatatctcatctnacccatcacacactatgcgattgactcacgtctgcgctctctgacgctgttgctacttggtactgagatatgtgtgagtgtgatngaagcattcgcagttctctcaactc

SEQ ID NO: 14394 - DNA, 582 bp, Glycine max
  misc_feature (79)..(79): n is a, c, g, or t
  misc_feature (86)..(86): n is a, c, g, or t
  misc_feature (135)..(135): n is a, c, g, or t
  misc_feature (143)..(143): n is a, c, g, or t
  misc_feature (358)..(358): n is a, c, g, or t
  misc_feature (390)..(390): n is a, c, g, or t
  misc_feature (484)..(484): n is a, c, g, or t
  misc_feature (519)..(519): n is a, c, g, or t
  Coding DNA Sequence Number=SeqID_4615
cgcactgacacctacacgaagatgtgtgattgtcaggatggctgcgcgtgctggtgtctgctatctatctgtcgtggcnttagagntgtttctggtctgcgtcgtgtccactagccacctacaccctacgcaaanaatcaganacgcaacgacgctacaacacgcccgcggctgagatcgcgctgcgcacagaccacctctactactctcaccaactcacccactcgctcaaatcgcgagagcacgaacatactcttaaattcatcttgaagagcaccaatgcgacgagcctctaagagcggacctagctaccgaacagtaagagcgacgcgcgtcagcacttatatgatataattanctatcgcacagaatattcttccttctacgctncaccagagcagtacaactaaatgcaagagtacggagcacgaatatctcatcactactacgcaccacgccgcgccgtgtagtattacgacgcctntcgaactgtagatgtaatatactgaccactgcccnctctcctaccacacagcgatgcgcgtgtgcctcgcgacactccacgagcacgcacaagtcgag

SEQ ID NO: 14395 - DNA, 351 bp, Glycine max
  misc_feature (65)..(65): n is a, c, g, or t
  Coding DNA Sequence Number=SeqID_4616
gatgacaccgtagcattcgtggcagcatggtaagtagctagtgcagtggtacacagggtgtcgantcttgtgtccagcaaaattactagcttcgaaaattacttccaactgatcttctacgggctccatgcgagccaggaactagtcagtttcgaagtggatggtactctacaggcgccagatggacctagatgttggcctactgaagatagccacagtcattggctagtgctgtatcgactggatcaaatgactgttactgggaagggaaccatagaaggctatggagaacagaggagggatcttccttgcgaacctcacagggagattaatcatctcaccaagcatatg

SEQ ID NO: 14396 - DNA, 548 bp, Glycine max
  misc_feature (389)..(389): n is a, c, g, or t
  Coding DNA Sequence Number=SeqID_4617
tccttaccggcgattagacaatgaggtccgtgctttcccacccttctgggtgttgccgcaccacaccgcccacccgtagtactctctcatttgatagcgtcgctcctattctttccatctccgctgtgctgtgcattctatttcctttctgtaatataactcactactccctacctcacctgtctattcacgccacgtgccgagacactgcgtaacattgacggtgaatacgtggacccgccctggcacgctctccccacctcatatttatttctactcttctatttctcatagaccttcctcttttttgtcctggcctcagtttttctgagggtgagcggggccgcggctttgcactgtctctccgtctaatgtacgtattgagaaanggagcgcatactggtaccattctgctgtaatgataaatccgattccgctttccgctcctagtagtctcccgtcctctggcacacgcccgcgcacatttctgtccctccccgctcgtctcatcacttgcctctgcgattaacatgcctcagtcacacatc

SEQ ID NO: 14397 - DNA, 372 bp, Glycine max
  misc_feature (27)..(27): n is a, c, g, or t
  misc_feature (41)..(41): n is a, c, g, or t
  misc_feature (47)..(48): n is a, c, g, or t
  misc_feature (241)..(241): n is a, c, g, or t
  Coding DNA Sequence Number=SeqID_4618
gctgatatcatttgtgagtccaccggnagttttcaccgatnaggacnnagccgcgcacatttgaagggtggtgcgaagaaagttatttattctgcccccagtaggatgcccccatgtttggtggtggtgttaacgagcacgagtacaagccagagcttgatattatttcccatgctagctggacaaccactggcttgctccacttgctaaagtataaatgacagtttggcatttgtgaggnttgatgacaattgtcattcatcctgccaccaaaaaactggtgatggccatcaccaagactggaaggggaaaaactcttcattaaactcattcaaaacactggacttgccaggttgttgaaaaaccttcctg

SEQ ID NO: 14398 - DNA, 518 bp, Glycine max
  Coding DNA Sequence Number=SeqID_4619
tgagcgaatcatcccattcgacatcattcctcgggtcatcgcccagaacgaatggcggcagatcgaggccggcgcccgccagcgcgtggcggcgctgaacgcttttctggccgacatctatggccctcaggagtgcctgaaggcgggcgtgatccccgaagaactcatctacaccaacccgcaatatcgcgtggaagccgctggactgaagccgcccaagggggtgtgggtgcatgtggccggcatcgacatcgtgcgcaccggtcccagcgagttctttgtccttgaagacaatgcccgcacgccatccggagtctcctatatgttggagaaccgcgaggccatgatgcggctgaccccggaactgttcagccgtcaccgggtggcgcccgtggaaacctacaccgactcgctgctggccaccctgcgctcagtggccccggcgggcgcaggcgcggacccgacggtggtgatcctgacgccaggtcgattcaactccgccttctatgagcattcgt

SEQ ID NO: 14399 - DNA, 593 bp, Glycine max
  misc_feature (110)..(110): n is a, c, g, or t
  misc_feature (290)..(290): n is a, c, g, or t
  misc_feature (438)..(438): n is a, c, g, or t
  misc_feature (520)..(520): n is a, c, g, or t
  misc_feature (522)..(522): n is a, c, g, or t
  misc_feature (554)..(554): n is a, c, g, or t
  misc_feature (568)..(568): n is a, c, g, or t
  Coding DNA Sequence Number=SeqID_4620
tacatatcatgctggtccgcgctcgacgtcgcagcgcgcgcttgtgtgtcgactacaacacactaccacacctcgccgtacgtacgcactctgtctcgctgatcatcatngaactgagtcggtcgaccaactacacacaatatctgcatactactactacatcagactatatactgtatctcatatactacctattcagtctctgcgctctctcatattatccacatctcaactcgccctctccctccccgctctcgtcgtgcatacatgatatatagtacactatcttntcactcctcgctcgactctccacaccctacgtgcagcgtgccatgcgctatgcaaccactcagactctgtataacagcgcctcgactccacacaccgtctgcatccctgcaactctcaccacctcagccctcacatacattcgtcgtntagtgcgaacgatcacatacatgtgcgtagagtgatatacgaaaacatcgacatgatgttgttggtgcgctacatggcctananaccagccacgtgctgccgtctcgcactctccnactctcacacacantcacacatacaacactgccgcgaga

SEQ ID NO: 14400 - DNA, 376 bp, Glycine max
  Coding DNA Sequence Number=SeqID_4621
gaattttgtaccaggctcacaggtgattatttggagattagagatgatccaaatgaaggcaatatcaattgtcttcttttgtacgctcttttatggcaatccaccacataacgactacacagtctgctcttctagatggttacgctctcacttgcattttgctaccgctgttgcacaactagccatggttgtcaaagcataggacaatgccgtgacgccaagcagctcaaggaagaagtgtgccctgggagcaactggggagggggcgtcgccgtgccctcgacagtgttctgttgcattgcaccagacattgtaaatggcttaataacagaccttgtttcattgctaattgccacggtcttgtattaaattcctt

SEQ ID NO: 14401 - DNA, 575 bp, Glycine max
  Coding DNA Sequence Number=SeqID_4622
aatcgttgactgtacgtcgtgcagataaggatgtcgaaagagggagaaacggtgatcggagttccgtattacgcgggacacaacccgtatcaagccggaatcgtgccgccgaacgcaatctacggagatccgatgggtgctccgatccagcaaacgatttatcgggacactcccgctcctttcaattgcctctattgcggcaacactggcctcaccagtatcagatctaaaccaggtgtagctgctgtggttgcttgcatgatgccatttatgcttgggttctgctttctctgcccttcaatggattgcctgtggaataagtaccaccattgccctcagtgtgggaataaggttgctgactttgagaaatcagatccatgcctggtgatggatccgccacagtggaagcaacccagcttcgcactccctgcatgattgttttcttattaaaattgaatgtgaagtcgagtcgatctgttgcttgtgcctaaaagaaattgaaaggataacccactagaatgtgtgaggaaatgaatgtatacaattgtctgtatcgtctagtgtcttgactcttg

SEQ ID NO: 14402 - DNA, 268 bp, Glycine max
  Coding DNA Sequence Number=SeqID_4623
atcctccacattcagggcggtcagtgcggggaccagatcggcgcctagttctgggaggtgatctgagatgagcacggcatctaccacaccggatgagtcagcggacactccgaacttcaaaaggaacgcatcaatgtctactacaacgaggccagcggtggacggttcgttgcactcaccggtcttatggatctggagcccagcacagctggactgggtcagatcctggccgttcggacagattttccgcaccgataactttgtgatc

SEQ ID NO: 14403 - DNA, 491 bp, Glycine max
  Coding DNA Sequence Number=SeqID_4624
aaaaaacactttaccagccatccatcatcattcccttttccatgaaaaccctttcctttgtgctcatctccacattgtttgcctatctattggcccaagactgtaacaacccactcttgaacgcctttaaccttactggccttgatactcctcaatcaggagcaggtctcgctttctgcggtaaccttcaaaatggtcagacctgttgctcagctgaaaccgtccaatccttccaatcaagacttgataacctcacaacctctcttcaagacttggcaggccaaagagatgtctacatgaccgagctctatgccaactacagcagcgaattccaacgtgctgctgacgacctcactgactatagcgatgagatttctcgactccaaagagataattctactgtcggtaacgagactagatatcaatataatggtctcaatcgtattgctcgcgctcttgataacattgataacaatttccgctctgctatt

SEQ ID NO: 14404 - DNA, 553 bp, Glycine max
  misc_feature (41)..(41): n is a, c, g, or t
  misc_feature (44)..(44): n is a, c, g, or t
  misc_feature (96)..(96): n is a, c, g, or t
  misc_feature (143)..(143): n is a, c, g, or t
  misc_feature (172)..(172): n is a, c, g, or t
  misc_feature (237)..(237): n is a, c, g, or t
  misc_feature (245)..(245): n is a, c, g, or t
  misc_feature (251)..(251): n is a, c, g, or t
  misc_feature (383)..(383): n is a, c, g, or t
  misc_feature (398)..(398): n is a, c, g, or t
  misc_feature (426)..(426): n is a, c, g, or t
  misc_feature (447)..(447): n is a, c, g, or t
  misc_feature (480)..(480): n is a, c, g, or t
  misc_feature (492)..(492): n is a, c, g, or t
  Coding DNA Sequence Number=SeqID_4625
cacagagccgactgaacgcgacgtcgcggtgacgatcgaancgncgactcgaatatctatgacgtatattcagatatctcatttatattcaatgtntcgttctagcttcgttatacagattactattatatattgatgatatnattctgatgttcgatcgacatcgacgtantagtgcgccgctgtggcgagtacgacaaactactataatacatacgcacataacatcatctattnatatcganattatnatatatacgcgcgtgatatcacacgagagatgtagagggtgagtggcgcgtctgcgcgtcgaagaatacgtgcgatggagctgcgtgaacggtagcgtgataatattcacaagagacagaagtgcctcgtcnacccacacatataancgattcgaattgagatgggagtgatggntgtgtgttggtgtttgtcgtnataatataactgtcgcgatctatacgatatatnatcatacagaanacatcagcgactacgacgatatagattcacgacgagatatgtagaacgtgcgcaacgcgac

SEQ ID NO: 14405 - DNA, 470 bp, Glycine max
  Coding DNA Sequence Number=SeqID_4626
gaggaaaaccatcctggcgtcatacacaatggagatcctggtaggaggtagaccgtgaaggagaccgtcaacatgatctcgtcgatctctccctgtcgcaggctgacccgtaacttcaagtacctcaacctcaacttacatgtgcaggagggagtcagtgatgtcaaggcgtacgcctggatcttcaccctcaagaccagtgacgctagccgcaccgccatctgccacgtccagaacctcatcaccggattcaccagcgtctaccactacaagatgcggttcgtgtatgctcacttccccatcaacgcctgcatcgccgccgtcaagccgagcatccagatcaggaacttcctcggccacaggaatgtgaggcatgtgcacatgttcgagagggacaccatcttgcgctgcggtaactcacagatgatatcgtcatcgaagcaacgacatcgaggtcatatccgcttcgg

SEQ ID NO: 14406 - DNA, 539 bp, Glycine max
  Coding DNA Sequence Number=SeqID_4627
atggtttggccttccacgactccagagtatttcctcaccactccactctctttctttcctcgctgccactccactctttttctttctttctttttctctctctcagcgcataaaccatggctttgttggtggagaaaaccacacaagtggtaccgcaagatgaagaacgtcttgttggggtttcagtgttaaaattgtaactgtaaatcatgtttgttgatgttgcagtgatgtggattccacgatattggcttgtattgcgttctcgtgccctaatttggcattcttggagatctcggtctctgatcctgcagttaatcggatcagcagagtactaggaaggagtcatgagcatttcacaaagcaccaagttcactgagggtacgcgtgtgaggaaataaagctaaaaccatctctggcaaggggagcctttggagtgccacaaaaagacgcaatttacacctcctgctcctttcctcgtgctttgtttcagagactcatttcacaaagcaaatgactaatatactttcccatgttca

SEQ ID NO: 14407 - DNA, 211 bp, Glycine max
  misc_feature (81)..(81): n is a, c, g, or t
  misc_feature (149)..(149): n is a, c, g, or t
  Coding DNA Sequence Number=SeqID_4628
aattattatcagtctaccctttataaatcttccaactataaaaatttcatagaataacactctgactcacaatatcataanaatttgctatatcaacacatcttatgagccttttatgaaaaaacatgataggacattccaacctacanatccatcgtgcaaacactatccggctagaaatttctgctaagaaaccctctttcactccaat

SEQ ID NO: 14408 - DNA, 577 bp, Glycine max
  misc_feature (167)..(167): n is a, c, g, or t
  misc_feature (206)..(206): n is a, c, g, or t
  misc_feature (368)..(368): n is a, c, g, or t
  misc_feature (423)..(423): n is a, c, g, or t
  misc_feature (489)..(489): n is a, c, g, or t
  misc_feature (494)..(494): n is a, c, g, or t
  Coding DNA Sequence Number=SeqID_4629
aaagatcgcagcctgctatcgtctcgaccacattccagaaggagaaaggcatacagacgaccacagcgtagcagagggacagtgtagactgctgtagtaggaacgtaaaaattaaaataggccagtatggcggcgagaggagcgtgagcagaataaccatccagagntgaacgacatctcatgacagtaggcagagcgctcagagnctcatccgtagcagtaaggagaaagggaggagcgagagacaagagagcaggcaacgcaggataaaggacgcggcggaacctttcatacaacatgcgagatcacgaagccagagagagagaaaagaagggtaatacagcgtgaaagagataggcgaagtcganagagacgcatcacaagccaaatgaaacagctacggagcaggagagacgagtagangaagagagcaaactcaacgaagtggagatgtggtacgccggaagagatcgtacggggacaccaagngggtntgtaggatggagagattgagagccactcatgcacgaaaggctacagtgttacagatcgagtactctcgactgatagaggcgtt

SEQ ID NO: 14409 - DNA, 597 bp, Glycine max
  misc_feature (173)..(173): n is a, c, g, or t
  misc_feature (396)..(397): n is a, c, g, or t
  misc_feature (412)..(412): n is a, c, g, or t
  misc_feature (482)..(482): n is a, c, g, or t
  misc_feature (512)..(512): n is a, c, g, or t
  misc_feature (514)..(514): n is a, c, g, or t
  misc_feature (520)..(520): n is a, c, g, or t
  Coding DNA Sequence Number=SeqID_4630
gtcatgctcgtcgtgcacaagatgaggagaggaagtaagtcgcctctcgcatgggaggcggtccatgtaggaagcgcttgatcttcctattgtactcgccgcatctacccgtaatccctcctctgatcctcgctaatatatagtcctctgtcttacagagagcactcaggganacgctcgaatattaccatacgttccagttcttaattagcgactatagacaccaggcgaaggttgtgctatctatacagctccgatcacttaccatataactctcaacctccaccgttctctctcataagtcatcgctatccctatatcatatcataacggagttcccactaaacttactttgcatgtctatgttcacacccatcccttctcaccacctctgtnnctcgtgacgcagtcncggcagtcagtatcgagcaatgtgataactctccactggcggatagaaggtagaggctacagaagagtcngaacacgagaccgtctacaaccatgaactngngtgtgnaggattataatgtacactcacggtcagtcgccgcgactcagtcagcctatgctacatcgctacgttactgcggacag

SEQ ID NO: 14410 - DNA, 401 bp, Glycine max
  Coding DNA Sequence Number=SeqID_4631
aggaatctacgttgaaggagagaacagagaagaatgggtcgccaaaacgttttcgtagtgtttagcctcgtgttcttggccgttcttggcctcgccgcagctgcctcctctccatctccttcatcgtcaccctccaaagctccttctactcccacaaccgatgtcgaagcaccagtgtccgaggacaccattggaaccaccgacgacgatgcagctgcttctcctggtgatggtgacgtggctgtggctggtcctcttggaagtgactcctcatacggtagtattgcaccttcaggcccagctgctgacagcggtgcggcggctcttggtgtctctgcggtcgtcgttggtgttacatccatcgccggttctttcttgtttctctgagttgtgtagtatca

SEQ ID NO: 14411 - DNA, 317 bp, Glycine max
  Coding DNA Sequence Number=SeqID_4632
cgtacgcaagcacggagatcttggagggtgattacaaatactgcacccgcagtttgaataccctgttgatttgataagggaaaccaacctgggtggtcacgtgccacaccctacaatgatgggcaagggtgctggtcaactccatgttcgatctggtctttcaataggtattagaagctatgatggagcctaacgccacccatctatgtaccaaagaccctcttttgggaattactcgaatgctgcattgcgactacctgtgatgcccacatgcaaagctaccatggatttgcctgctactgcaacatgtgactcac

SEQ ID NO: 14412 - DNA, 339 bp, Glycine max
  misc_feature (307)..(307): n is a, c, g, or t
  Coding DNA Sequence Number=SeqID_4633
agtcaacaggtatgcgcagcaaaccgatgcagggcagcaaaccaagtgtcttctgctctcaccaaaggctgtggtgaatgtgaagccaaaccttcagatcatcgccgacgatgtcaaatgcacgcacggagctgccatcagcggggacctcgacccgaacgagctcttctacttccaggcgagaggcgtggacgccaaaacggcgaccgacgccctgcttttctcgttcggagcccaggtgataaaccgcatcccgtttaaggccgtcgagaagaaggctctagcacagctcaaggagctgctcgcngtgtcaagacaagacaattgatgaggcctgag

SEQ ID NO: 14413 - DNA, 381 bp, Glycine max
  misc_feature (34)..(34): n is a, c, g, or t
  misc_feature (41)..(41): n is a, c, g, or t
  misc_feature (99)..(99): n is a, c, g, or t
  misc_feature (149)..(149): n is a, c, g, or t
  misc_feature (250)..(250): n is a, c, g, or t
  misc_feature (263)..(263): n is a, c, g, or t
  misc_feature (333)..(333): n is a, c, g, or t
  misc_feature (339)..(339): n is a, c, g, or t
  misc_feature (341)..(342): n is a, c, g, or t
  misc_feature (355)..(355): n is a, c, g, or t
  Coding DNA Sequence Number=SeqID_4634
attaggtactacgtcaattgcgagacgtgcgatngtatatntcgtgttcacttcatcgtaagacgcgtgctacatagataatatcacactatgctctcntttgtgatgattgtgcgtcgtctagcatatgacactatatcactactctncagctatacatattatatgtatatgcatatgtatatagtagtaataaaggaatttatatgagtatatagtgatgtgtgacagctgtagtctcagttcatcnttcacatacatcntactcatgatgtgagatgtgtggtgtggtgtagtagttgcgcagttgagtgtagatatatacactcaganaccatnanntaagagtggtgtngatcaacgcacgagcgtgacgagagt

SEQ ID NO: 14414 - DNA, 398 bp, Glycine max
  Coding DNA Sequence Number=SeqID_4635
aatgttcaacctgtttcagctccagtcacagtctgtggtgatatccacggacaattttatgatcttcttgaacttttcagagtcgctggagaaatgcccactaccaactacatcttcatcggagactttgtcgaccgtggctacaattccgtcgaaacctttgaactccttatgtgcctcaaagtcaaatatcctgctcatatcactctcctcagaggaaatcacgaatcaagacaaatcactttagtttatggcttctttgatgaaatcgtccgcaagtacggtaatgctaatccctggaaatactgcactgatgtctttgatcaccttggccttgccgctcttatcgaaggaaaaattctttgcattcacggtggtctttccccagatatcagaac

SEQ ID NO: 14415 - DNA, 594 bp, Glycine max
  misc_feature (144)..(144): n is a, c, g, or t
  Coding DNA Sequence Number=SeqID_4636
catgccctgcttgctggtcttgctgtgaggtggcgaggggggagtctcggcacccccctccccggcctccctcgccccgagagaccacacacatgaatcacgtaccaacctgtacgcagacaaccttcttcctgcctcaactgncaccaccccacgcaacgacaacgaccgcacacgctccacgctcgtgacgctcgccgatctgcgtagagtgctgtgacggttgttgtgttcccaccccgccccccacctctatccaccctcgtggtcagcggtgggggcgtgttcgtgcggggctgccgtgtctctggtcttatgattgtgtgttggtatgtttcttcatccaccccatctatacctaactaggtcacactacacctctcgtggagtaggtcatgttgccttgtctgtcgactatttatcagacacacagatacttgctgatgacgagtgaggtagatatcttataagaacttgtacatattattagaacctcttcacttgctgctgtcttgaacagagtaactgagcacgtgcaacaggacgaggacgaagggagcagtcagagcaatgtgccaagcagtgcggtccgca

SEQ ID NO: 14416 - DNA, 531 bp, Glycine max
  Coding DNA Sequence Number=SeqID_4637
atctgcctgcccagaggaggagacagcgatgtttcccgacaaaagtgcccatcccaggttggatgcctacgcggggaacatgaatgaacaccccatgtactgctcaactccttgttgaaacccaccataccctgaaggttttcaatggccttaaagcatgtcgagaaagggggcggaaatccgggaggaccttgggaaaaacctcctttctacaaaaaacgggcaggattattttctctctatgaaccaactttgaaaaataaaaaataaagccttttttctttgacgcctccgggccccattattgatgaatgggggaggggacctactctgaatttataactttccccgcaaaacggaatttagtttccccccccttggattatcgccccccccaaaaaaaaaaatggccattatagggcatccagctccttttccccaaaaaggttttacccggtctcccacaaaaaaaatttcgaaaaagactaggttgggccaaaattctcctgtattctcgcgattgcggtccac

SEQ ID NO: 14417 - DNA, 476 bp, Glycine max
  Coding DNA Sequence Number=SeqID_4638
agcgcccaccctgttgagggagaaggcggcatcggcagtgtcaggcagttcaacttcacctcagccatgcccttcaacctcatgaaggagaggctcgagttcattgacgtggacaagtgtgaatgcaagtcagccctcatcgagggtggtggcatcggcacggcaatcgagacgggcacgtcgcacatcaagggtggagccggcagccaacggtgggagcgtggtgaaggtggaatcgacatacaagctgcttccaggcgtagaggtgaacgatgagatcaccaaggccaaggactctgtcacggccatcttcaaggccgccgaggcctaccttattgccaacccggatgcctacaactaaatcagttgagaggaatcatacataattatgttgtccctggtttgattttttgtgctttcttcttgaactaataaagctgttacaacggtccagcctccaagctctgaagcgagag

SEQ ID NO: 14418 - DNA, 575 bp, Glycine max
  Coding DNA Sequence Number=SeqID_4639
gcacaatagctttaccaaaaaccatatcctaatagctagtgttttgtagaaatccctcgtgccgaattcggcacgaggctcatttgacattcaacacggttcttcgaatggtcgtcggaaagcgacttttcggtgctagaactatggatgatgagaaggctcagagatgtgtgaaggctgtgaaggagttcatgcgtctgatgggggtgttcacggtggcagatgctattcctttcttgagatggtttgattttggtggctatgagaaggccatgaaggaaactgccaaggatttggatgagatttttggtgagtgggtagaggagcacaaacaaaatagggcttttggtgagaacaacgttggtggaattcaagacttcatggacgtcatgctttccttgtttgattgaaaaaaccttgattgggtagatgcggataccatcatcaaatgcccttttctgtcagtaatttcaggaggaacctgaacaaatattactactctttcgtgggccagatgtttgatttcgagaaatcctattgtattgtaaaagagtttggcagagcttgacttttca

SEQ ID NO: 14419 - DNA, 385 bp, Glycine max
  Coding DNA Sequence Number=SeqID_4640
attatgttccagcttgcattcggcacatcgtagtgttcgtgttagagagagagagagagacagagagagctcatccatggctagagagatggagaaggcaaggaaggccacctcccctaagacctcatcaactagttcaggtccaaaaagcccagcaaggagtggagggtcccctcctcataagaagaacgtcaccgaggcacgaccaaaaaatgagcagcagaacttccgtaaaggcggtcaagactcggcaactcatgatgagagcaaacgccgttcaccaactttacaaacctcacccaagagatcgacaaaacacgagcagccactgagctactgcaggcttcacaccgaggagcgggcaataaggcgagctggttacaat

SEQ ID NO: 14420 - DNA, 338 bp, Glycine max
  Coding DNA Sequence Number=SeqID_4641
aacacatacatctcctctggaagcttgaagattgttgctgtagaagagaacacagagattgaagagacccagcagaccgacatggacagatggaacggtcttgcctatgatatcatagacgaccaacaggacatcacaataggaaagggtttggctgactcccttttgtcaggtccactagatgctgcaactcactatgctgtgatgagctcctactaacctcttcgcactgaacataaccacaacatgctcaacaacacggatggatatgtccaacggtctgactctgttagacctatcttatagtgcatcggactcaatatcttcgtgacccttcg

SEQ ID NO: 14421 - DNA, 280 bp, Glycine max
  Coding DNA Sequence Number=SeqID_4642
gaggattgcttcataactgtatctgcatagcgagtgcgcagtaggaggactggatcgtgtatatgatattggatacctattcaggagcgcgggccttacttccactcattatcctgacactactacctgctagcattctatggctgatcatgactacaatgactcaacggatcctgcagaccaaatggtgcatggtatgaatgatccatcgagatgctgctattaaatactgcatcatgctccttggatcgatatgcaacctattggaaatgactttact

SEQ ID NO: 14422 - DNA, 441 bp, Glycine max
  Coding DNA Sequence Number=SeqID_4643
tccgatctaaccctatgcagttcatcctcggcgtgaaaaaaaaaacaacaaaaagcttccaagggacgtttcgctctcccagtgcagcaaggcgcagggatcagtgtggataggaagtgtgacggtcctgctgggcagctatggaagaacttaccgcttttgtatccaaatcgtttgaccaaaaaagcaaagaaagtaacggcggaggcggcggcggcggcggcagcagcaagaaggagacaattacctacagggaagttttggaaactggtttggctcgggtgagggagctgggaaactttgagactaacctccaggacatcaccgacaccagcaaccactgcccgctgcacctctataaagagcacggcgccgacagcgacaaggacaaactcaaagactacggttcggccagagtctcggaagggatctatgagtgca

SEQ ID NO: 14423 - DNA, 482 bp, Glycine max
  Coding DNA Sequence Number=SeqID_4644
gagagggaccttgtgaaggcttttaaagtgtttgatttggatggtgatggattcatcacaagtcaagagctcgagtttgtgctgaagaggcttggcatgtgggatgatgaaaggtgtggcaaggattgcaaatccatgatttgctcctatgacactaactttgatggcaagcttgattttcaggagtttaaggacatgatgctgcttaccatgattgcatgcagcatccttaatttttccaatttattttcttacagatgcctccaggagggattctcactgctttgtatgcatttcacagtcatgacatctcaagaggaatattagccttagctttccttcttgttgtgtttaactgcttgagcagtttccagatatactcaatgcctgcttttgacagttgtgaagctggctacaccagtgggacaaaccggccctgctccatatgggtgagatcagggcttcgagtcctctattgatgt

SEQ ID NO: 14424 - DNA, 543 bp, Glycine max
  Coding DNA Sequence Number=SeqID_4645
ttatcgatgataccaagagacttgctgaagaagatagaaagcttatcgaacaattgaaggcttcaagaaacttgctcaataaggaaatcaatagagctgaatctaataataagaagcaaggaaatgatttgatcatcagtcataaagccaataaagaaaaggataatgaaattgtgaaccaagctaaggaggttgaaatcttgaaaaagagaatctctgagcttgaaaaagaaaaggaaaagtatggtatcactgctgctcaagctaatgccaaatatttccatgccttggaagaaattaagcttaaggataatttgatctcagaattccaaaagaaaaacattgaaactgaagctaaattgaaacaacaacaaaatctctacgaagctgttagaagtgacagaaacttgtatagtaagaatttgactgaaactcaagatgaaattgctgaaatcaagagaaaatataaaattgttaatcatcaaatctctcaactcaaagaagaaatcgatgctaaagaagctgctttaactcaagaacatt

SEQ ID NO: 14425 - DNA, 399 bp, Glycine max
  Coding DNA Sequence Number=SeqID_4646
tttcctttgatatccttcttttctctcatgacctcctctttactcatctcacaatgactatacaacctctctagctcctgtatatcagtatttatctttctccattcattcgatatcgcttcttgagcatgctttacttctctcttcattacatccaatttaccccattcatcttcaagcaccttcttctttgattcaatcttcttatccatcaacagtaactgcagatccttttcagctaactgttttgcagtcttactctgtatattctttacgacttccttcaaagaagccttcttttttatcaaagtttctttctctattctcaatacttcctttacttcttctatcatctctctttcttctctcagttcatctctttctttctggcattcttct

SEQ ID NO: 14426 - DNA, 191 bp, Glycine max
  misc_feature (123)..(123): n is a, c, g, or t
  misc_feature (152)..(152): n is a, c, g, or t
  Coding DNA Sequence Number=SeqID_4647
ttcgagcggaagttcggaagcacctgaggtcggcgcccggtcgagctggcggaggaaattcgtatgtttcccccatcgtcagaactcgtccgaactgcaatcatctggtttttttttataggngggagggggtccaggcgggggtcgagtcnagcgttcagtagttgaactgcggcaggtcggaggccgcc

SEQ ID NO: 14427 - DNA, 351 bp, Glycine max
  Coding DNA Sequence Number=SeqID_4648
tcctcctccccagagagcagccacacgccgcgggccaacgccgcccgcccgtccggcaccctcgtccaccgcccgcccatctccgagcaaccgtacgccgtggccagcgcccgcaagcccgtgcgtccgccgccacgcccagcgcccttccgccacctcgtcggcgccgcgtgaagctccatccctcgcgagctcgtcctcaccggccggccatgtgcaccccagctccttcggccgtgcacccgagcccgtccataccccgagctcctccacacccgccggtcctgtgctccacctcgcgagctccgccgctagagcagccgggcgctcaaccggtcgagcaccggccat

SEQ ID NO: 14428 - DNA, 160 bp, Glycine max
  Coding DNA Sequence Number=SeqID_4649
attggttgtgccatctcatagctgtgaaagtccattcgagtactttccagttcgtttgtcaatatgcaagacctatacactgtgaaaggagtgcagaatcttggagacacagcagtgatgtgtaataggctatatgtcaggactgcagtatttgactgcc

SEQ ID NO: 14429 - DNA, 367 bp, Glycine max
  Coding DNA Sequence Number=SeqID_4650
gtatgactgcaattatttctcagttttgggtgttactacctgcctgtgactagcttttattctttgattaacatatattttgattcactttaactagttacttagtgaactaagttcttatttaaaaaggagagttttcacaattggttttcacaatttctcagaacctgaaaatctttctgcatatgatggtttggagttccgcctaaaaggtgatgggcgtacatataaaattattgttcgcacacgcagtgattgggatgctctaggttacactgcacgttctgacactgacaaacgataatggcattcaactccagcgccacctcgttcttgcagcctgttcgccagcatgaactgtgttcat

SEQ ID NO: 14430 - DNA, 330 bp, Glycine max
  misc_feature (35)..(35): n is a, c, g, or t
  Coding DNA Sequence Number=SeqID_4651
ccctggtaacacgttataatgggtgaatgcttggnaacatccaccgggttggtcgtgtttggagtgatcctcatgatttcaagcctggaaggttcttgacaagccacaaagatgttgatggtgaaggcgtcagcaactattgagctcgctccctttttggtttctggcaaggagtagcatgtcccttggagcactcgctggactctgcagtgtgagtgcaccttgaccatgggctagcactgtctacattcctcttcaatgattgcttcctcctttcaaatcaagtctgttggacatggacagtagagcattgggactcgacaaatttta

SEQ ID NO: 14431 - DNA, 494 bp, Glycine max
  misc_feature (152)..(152): n is a, c, g, or t
  misc_feature (199)..(199): n is a, c, g, or t
  misc_feature (327)..(327): n is a, c, g, or t
  misc_feature (362)..(362): n is a, c, g, or t
  misc_feature (373)..(373): n is a, c, g, or t
  misc_feature (384)..(384): n is a, c, g, or t
  misc_feature (422)..(422): n is a, c, g, or t
  misc_feature (438)..(438): n is a, c, g, or t
  misc_feature (469)..(469): n is a, c, g, or t
  Coding DNA Sequence Number=SeqID_4652
atgacgcgcgcgtatcggctgtcgtgcggaatgctcgtcgatatactcagcacgagtgactgatcgctcgtctctctgatcgtactatatgcatgtcgtgcactgcaccagcagccagaagatgtcgcagactatgactctgtatcattaantcagctagaaataaatgcagatcgcactccatctcagatactcgagncatccgagtgatcaagatcgcgactcgatgtaattgtagtagcaacgactgcatgtaagcgagagagatctgcgtgcacgatcgatagtatagtgtacgagaaagtgatggagtcttctcgcatcgcngacgcgatacgataggagtacatcagttgactgangcagttgcgtnctctatagtcngcatctactcatgtgacatacgtgttctgtcatgatgntatacaaatctatcgngccgacgcgtcacatcatggcgagacagganatatcacaacgtcgcgtgtcggagc

SEQ ID NO: 14432 - DNA, 514 bp, Glycine max
  Coding DNA Sequence Number=SeqID_4653
aagtagcttgtgtgcattcctcagtccgtccgtctctagtgtgccatggctcggctctaccacctcaccttcctctccgtcttcttctacctcctcctcaccggcctcgtggctgccgatccgtctggagggaagaaggtcggcaagaaggtgatcatgacggtgcggtacccggctgccgactcgggggagaagatcacgatctcgacgcgcctcatcggtgagggcggggtcggcgacagccacttccatctcgacggcgacgactacgaacccatcattttcgccacgaaaaaccttgtctcggccctggagaaggtgggagatccgcaggccaatctatccgagctgtagaagcacgtacttgacgtgagtgagctttcacggggctcactgcatgctcagtggtggttgcatgcccagtcagtggagattggcgatggagctcctcttttctttcctctcagcgagaatacattaggcgctttttattttgttgtagtgcccattcggg

SEQ ID NO: 14433 - DNA, 479 bp, Glycine max
  Coding DNA Sequence Number=SeqID_4654
tgctgactttggagtacgtgccgttggaggagctaactgtaagaatgacacctgatacatgaacatactcgaggatggctcgagagatgatccaacgtaggccttacacacaaatagtggatctatatagctacgtgattgatcttagtaactcataactgatatacattcatcgagaacataacaacagtacaggccgcctctgcagttgataccagatgagttactcctgtcttagataacaaatgtctagcgtatctgcgtgatataatgaatagctgctgattagtgtatgtgtagtttatagcccgagcctgacaacgtgtcgatgagacatcagctgagttcgccgaattattggcgatgcagacatagccatttagcaacctgggtggatagctaagatggcgcgacgatgaggccatcaaagagctacgacatatgaatgcacgagggtatgacgcttggacagacctata

SEQ ID NO: 14434 - DNA, 382 bp, Glycine max
  misc_feature (351)..(351): n is a, c, g, or t
  Coding DNA Sequence Number=SeqID_4655
ttcttggttaatccgtatctaacgttatacggttagcgtgaatgttgtatatcactctgcgagtcatataatatgatcattaaaactctcacgggacgatgtatgaatacatgtatcgacttaaaagtacaatcactcataacaattaaatagtatacaactcagtataatatttgtgtttataatttattgtcgttttcttgacgttctatattatcatatatatgtgtatgcttggagagatagaatcgtcatcatctcacgtgtcgagcggaactaacagcacaaagaaaacaacgtcacacaacacacaacaacgcgacgatcgaagcacacaaccaagagaagtgngagatgaagagaactctcacgcgaggaggaa

SEQ ID NO: 14435 - DNA, 558 bp, Glycine max
  Coding DNA Sequence Number=SeqID_4656
gcacatgttgatcacatccctaacattgattttcagcaacctccttagaagtggtcttgggcaatgtaacttcagcagatgatgagagatcttccaaaagaattaatgcactgttgaccatggttgatgctcattattggacagctgacaaaggaaatactgtaatcaattatatgtcttcaaataattggtgcattacagttactaatactatccttggaggagatcccaatcctaataaaccaaaaattttaaacatgttgttttggtatactttcaaaactatgatgtttgcagtctccagaaatgaagatcaagagtattgtgccaggtatccttctcccgaaattccttacctttgggttcaccatgcttattttggttattctgacgttacacaatggttccgagattactttttcgccaactatcaatctggagtcatagttgttgcttctaatagtatttttggtacctcagaaacgggaactccttatttgactgtttattataatgatgcaaataataagaacaagatggtctctggcgctgttaata

SEQ ID NO: 14436 - DNA, 397 bp, Glycine max
  Coding DNA Sequence Number=SeqID_4657
caaatcatagtgaaacccaccatgttgacacagacgaattaatgtcgttgcaaacaaccatggagccgccaaaagacagccatgacaccactgcgcacaaccacaaacgaggtttgatacaaccatgctccccttcatctaaaccagatttgcgaacaaatccgttgatttacccaaatcagaagtgacgagtttcttggtggcaccatggcatacgacaaccgaggttgttggcgagaagaggagcacgatagatagaggtgtttgtggtagtggggtcttcggattggagccgatggatgagtgataacgactaaatatgagttattttaataataaaaatatattgaaaatgtctttaaaaatatttatttaacagttatctttggttcaaata

SEQ ID NO: 14437 - DNA, 450 bp, Glycine max
  Coding DNA Sequence Number=SeqID_4658
aaatgggctggcgtaaactttcacttttccaatgaacatctaaagcttaattttggacctatatcatgaccattcaatctccgccggacaggggtgaagaacacacaacaacacaccgatacgaatctggagttattccccacagaccccgtagaaccgggggggtgcaaccgtgagtaaagcgccctaccttgaccagtgatagagaagcacaacgactgtccaagggctcatattcctcctcggacttacaggcggaggcaatatggtcctcatggagggattgaccctggcgggaaccctcaccggactggcaggtgccacgccgctctttgtcctcttcagcccggggctggttccagccacgggcgccatcggcctggccgaggccgggttcctgacaataagggccttacggctcacggggctgactaacttttcctggatcct

SEQ ID NO: 14438 - DNA, 516 bp, Glycine max
  misc_feature (95)..(95): n is a, c, g, or t
  misc_feature (153)..(153): n is a, c, g, or t
  misc_feature (178)..(178): n is a, c, g, or t
  misc_feature (279)..(279): n is a, c, g, or t
  misc_feature (289)..(289): n is a, c, g, or t
  misc_feature (330)..(330): n is a, c, g, or t
  misc_feature (472)..(473): n is a, c, g, or t
  Coding DNA Sequence Number=SeqID_4659
tatctcactgagtcatgacctatgagtcacttgcactaatatagatttgatatacatctattctcgcgtactcttcactcgatctctcatctctnctactctcatagtcttcgtgatgtcatgctctatcttctatactcgtgtattactcgngacacaccacgtccacacgcactcnctccgcttgtcctcacagatgtataccactacagcacacatttaggcactcgacatcaggtgcagcatattcacgacacaactgatcgtgcagattttcanactcccctancttcctcactcctactttatcttcattatatgtgctagtantcacttatgtgtgtttgcataaacaatatactatcaattcacaactagaatcatcacacataatcaatcaaagcattgacatacatatatatttatgtctcgatataaatatttgtaatgctagtttgttcatcttatcacnncctctctatctcacatgtgtctctattctccactatgttctat

SEQ ID NO: 14439 - DNA, 452 bp, Glycine max
  Coding DNA Sequence Number=SeqID_4660
agttctcttctgaggactcccaaaacactgactactccatggattcctcctttgaaatcgatgaaactaacgctcaaaacagttcctctaataagtttaatcaactacgtgagaccatgaaccagctctttatcgctaatccagagctcgctgacgagatgaaattcgagcagtactatgcagctgatgactatcaggtcgagtcacccaaaaatccagcatctcccagaagaacaacaggttctagtaatactgacataccacaggcaaaacctgaagctccaacctcaaattctacttcgacaaaattatggggtgtgatatccaaggagatgactaagacccagaagaacacaaagataccttccctaaaccaaatcaaccacatccttaacatttacaagacaaagcttgataaggccgaacctactgacactagtcctccaaagaga

SEQ ID NO: 14440 - DNA, 400 bp, Glycine max
  Coding DNA Sequence Number=SeqID_4661
taccctcttacaaagctctagcttacagatgacgacaaccccttcccaaaggatgtcgaagccttcacgaatgtcgaaaaccttaacgggaacggcggccctgacaaccatcaagaacatcactttcctctatgatgaagacagcaagtttgtgctgcaccacatacaatcagctgatgatgcacaatcttgggatacactctataacgtacatggtggagtcgccttgccatacacactggagaacatcaccttctactgcaaattggctgctggcgccaacggatgtcctgctgggaagctaactgtcaaataccaaaccaaacgagatgctcagcccaacccagacgacctcaaaatatggaaagccacgtctgatgctcttttccaggcctgtgac

SEQ ID NO: 14441 - DNA, 552 bp, Glycine max
  misc_feature (136)..(136): n is a, c, g, or t
  misc_feature (478)..(478): n is a, c, g, or t
  Coding DNA Sequence Number=SeqID_4662
cgaaacggtagtgtagcgcgcgctagaatgtatctgtcaacaaaatttgttagtagtgaatatcactagcacgctcgcaatgtatcgaggcagatatctaaaacagtacgaggatgcgttatcacacccgtccagntcgtggcgtgtgggccgcgggcgaccaaccacacaccgacgcattcgtatatcaacgcgcgcatagataaacccagacgcgtataccgcggtccggaaaatcaaaaaacacaggcgggaggaaggcgtatatattaactatatcaagagcgttcgttcgacggcagccgtgcgtgtaaccactattaaatggtgagtgggcccgtaataaatataggctgagagacaagtccgttgtgagacaaatatctgcggttgactaaggtgtatagaatggtgtgggagcgcggcagatcgtaacatacataggttaaacaatcacccatctccgcggcgagcgagnaactatttaaaattaatatgtatatcagcggccgcacgatccggcgatcgggacacccaccacgcaaaaagcgg

SEQ ID NO: 14442 - DNA, 483 bp, Glycine max
  Coding DNA Sequence Number=SeqID_4663
tttctccgagcgacattttcacaattcagagaaagcagatcgtagacagtcgaagaacgaagagtgcttcctcgtgccgaattcggcacgaggattccctattcacaattcccaccaaggaaataccgtaaggattgcttctatcattgcaccccagcaatgctaattcctagttgtgttgaaaatgttcattcttgtgaggattggttgccaaggagggtaatgagtgcatggcgcatagctgggatagttcactctttagaaagatggagtacaaatgagtgtaactacaaaatgcataacatagacaaagtttggcgttcaacccttcaacatgggtttcaacctctaactactccaatcaaagagatagcgcattgttaaagaatagtggggaaattaaatcatgaatttgttttactgccttattgttgctctttagatggtatttatccttccgagttatggttagaatttcctaca

SEQ ID NO: 14443 - DNA, 492 bp, Glycine max
  Coding DNA Sequence Number=SeqID_4664
taatgttgagcactcgcgcccgccacgtcgggccccccccccccccccaattgcaagttgatgctagatcgacgtgcccaattggaaaggttggggggaatcttgccttcaccaactaactttgagggtctaatacacctgttagtaaactcttgtttgttgggctagattttcttccttgactgacactataacaagggtcggcttctgccaggggtaagaaactagatctcgatcatctcccttttcccgggctgcaaccacatcgcattaatcatgggggaccccttcctgtgccattaattgccccttctttgaatactatagatattttttaaatgaatgatgtgctttcacttgttgctctttttttatagtcccatttttgcagtttatcctttttcttttagactgtgctttttgttgttttcccccctttgtgtcccctcctgcctggcgctccggcccgcctcatgcacgtttttgtgtcat

SEQ ID NO: 14444 - DNA, 573 bp, Glycine max
  misc_feature (255)..(255): n is a, c, g, or t
  misc_feature (268)..(268): n is a, c, g, or t
  misc_feature (310)..(310): n is a, c, g, or t
  misc_feature (377)..(377): n is a, c, g, or t
  misc_feature (399)..(399): n is a, c, g, or t
  misc_feature (539)..(539): n is a, c, g, or t
  Coding DNA Sequence Number=SeqID_4665
gatgtgcgtcgtaaacagtaagtgttgtgttgttgtgtgtggtgtgtgttagcatattatatctgttatatcattgcaactgcacggcgactcacgagcttcgtacatgatctaccctttatgttattattggtgtgtggtattctcgctagattcgcctgtctcatatagagtgcggtgtggtggcgtgtgtgtacgcgtgttcgtggggtgggacgatatagcacgaaacacacagatatagtagatgttggnagaaagagagcgntctgttacaataaatggtgggtgtagggatgatgttagtgantctgcgttgttatttgtgtgattgtgcgcggcgctcgttgctctgtgtgatgaatacatcggagaanaatgtgggttggtgatgtaganagggtgtgtgtgtgatcggtgtgtgactgtcggcgtggtggtgtggtgctggtgatatcaacagatacacacataatagtgggtggtgacaagacggcgaccgacggcacatacactgatgataatatcatactctttcngttgctattcatacactgtgtccgcgcgacgatg

SEQ ID NO: 14445 - DNA, 420 bp, Glycine max
  Coding DNA Sequence Number=SeqID_4666
accgagctactcacgttagttcgattaacctatcagagctgtttacgcagcacaaaagccatacaaggcgttgtagacgacttgcgtatgcttgcaaacaagattgaggcacctgccattaagaaatcgctgctttctgaactggctggcagcaataacgcagccgaaagtatcaaggttttagtcgcaagcgctgctcaaggccgttctccttgtgcgtttattgaggagatgctccttttcttgcctaaagagcagcttcgactacaactcccatcaatcacacggtctctcgtcgaagccgttgagcggaaaagccggctgccaactgagacatgttggtaccgtctgaatgtgtggctgggtgtcctcgaaaacctcgataacagattcaatgttcgctacactgataccggttat

SEQ ID NO: 14446 - DNA, 311 bp, Glycine max
  Coding DNA Sequence Number=SeqID_4667
ctctgagcataacactcttatcaacaatgctctgaactctatatggaccattacactatttccaactccgcattctagtgggctaccccctcctgaacgacggggaaccatttaccgttctgaaccactcacctttgattttaaccccttgaacttccaacatacgaccgtgatcttcaattcaacggcgttctcttgtaataaccaaattctcaatgcatatatccataaattcttcccctctcctaaattcttccgataaatcaatgatatattctcagtctccttccaggtcaaatatcttcaacata

SEQ ID NO: 14447 - DNA, 331 bp, Glycine max
  Coding DNA Sequence Number=SeqID_4668
ttccctctccgcacaaaaagggaggaaaatggggtgctaggaagaagaggagcacgtgcggacggcaagcagatgcgtggctgctgttgcagctggcctacagcagcgattgcgatcttcctcgaatatgctttggctctacagattttactgcatgtagctacgagagagatggagaggatattgagatgacactcgtggttgctttttgattaaagtttggtgttctatgctgttcaaatttgtgccatatcctttgcaaggattgttaattagtttctctgaaacaaaataggcacactcaaattgctattgtctgctactcctacat

SEQ ID NO: 14448 - DNA, 559 bp, Glycine max
  misc_feature (107)..(107): n is a, c, g, or t
  misc_feature (374)..(374): n is a, c, g, or t
  misc_feature (446)..(446): n is a, c, g, or t
  misc_feature (459)..(459): n is a, c, g, or t
  Coding DNA Sequence Number=SeqID_4669
atagacttgtctctccaacatacgacaagaacatgcaatcccttggtgcaggttcgtgtggggagtgggtgttggcgtacggcacgaggttgtaatcgccccaccanactcatacttataagtctagtggcaagactttaacacctagggaatccgagttctcgatcgcgttccacggagcgtcacacgcgactactatgcaaatacgactccacccgtattgcacaccacgatacacgaagttgtgcagtacacgtcacttataccaatcaaacgtatctcgtacgtacgatactgggatatcgccgcgcctgagcacaccagaaggacatgtaaggccctaagggattgtgttagggtggagaatcgcatancccttcgcaccacgccgcgtgaggatggagaaggtacacggaccaatgtcatgaataagcaccgctccttcnacatataggacanacgaatgacgattgtattctgtcgtagagagtagggtctatgtactgattttatgagcagatcagacaacacaccgatatcgcgcacaatcacgttggac

SEQ ID NO: 14449 - DNA, 497 bp, Glycine max
  misc_feature (148)..(148): n is a, c, g, or t
  Coding DNA Sequence Number=SeqID_4670
gttccacaacatatcgcatctgcagccgtgtatgcccagaatacagcagagggagagggttgctgcatcaggcggctgtcgaggctttgtacatgatctgtcatgcaaatgcagggtagcgaacgggggcggaaacatgcttagctgncctctgagcctcaactatgcatcgtttccgtcccacgtctcgtgccattcgtcaacccaggctgagagcgacaaagatacaagccgtactcctcctggggccctccagcggtgtgacaaatggcgcaggtgcatcagcacctgcaggtcagctcgcactgagcgggcaatagcaaagatcggacggagctgagaggatcatgtgttcgctttcagatgggtgcaaaaagtccagcgagaagcggtgtaacaacgttttgaggcgctgggaattgagagacgtcacgtcgttgtgagttccgagctgagacatctctcgcgacacaatgccattgtttggatccgaaacg

SEQ ID NO: 14450 - DNA, 538 bp, Glycine max
  misc_feature (253)..(253): n is a, c, g, or t
  misc_feature (360)..(360): n is a, c, g, or t
  misc_feature (484)..(484): n is a, c, g, or t
  Coding DNA Sequence Number=SeqID_4671
gatggagacaatggccaatgcactatggtgtgtgtccaagatgtgtgagtataatgcagtactgtaagctattggtatgagataactatatgtgtggtttaggagaagccgaatgcgttagaagtgtaggataagattgatgaatagttgtttgtgctgtgcggcggctgtctccgatggtatatctggttgccatgcacgcacatgatcttagtggatcacaacctacacccagacgaactaccgagagatnaatgtaaatgttgaacgcgatgcacacccaccgaaccaacgtgaccacctgagatcagagatgcgatagatgaaaagtaattaatgatgcacagtagaaatatgatntgatactatacttacgacggttggtacagtctctggcaatgtgcctgcacatatcgcgctcgctcacagagcacagatctatttagtttacagactcatagataattggtagtcactgtattcntcaccaccataggcatgcgatacagctacactcactagtgcacgtgtctacaat

SEQ ID NO: 14451 - DNA, 372 bp, Glycine max
  Coding DNA Sequence Number=SeqID_4672
ggagagcttcgatccctgctcgcaactctgccctcatcgctatgatcgccgacgaggacaccgtagttggatttttgatggctggagttggtaatgttgacatcaggaggaagacaaactacctcatcgtggattcaaagacaaccgtgaggcaaattgaggatgctttcaaggagttctcatcgagagatgacattgctatcatcctcatcagccaatacgttgccaatatgatccgtttcttggtggatagctacaacaagccagttcctgcgattctggagatcccttccaaggaccatccttatgatcctgcccatgactcggttctctcccgtgtcaagtacctcttctctgctgaatctgtgtcac

SEQ ID NO: 14452 - DNA, 500 bp, Glycine max
  Coding DNA Sequence Number=SeqID_4673
caaacttcatatttgcgcctttggggattgaaaatcaaaactcagggtcttttcggttcataatcccaagggggaaccatacaaaaaacctgaggagctttttttaataaaaaacctttcatggggcccgtgccaaaagatctaaggaaaacaaatttttctggggggtccccccgaaccaaattaaacccacatagggctccacaaaaccttaaaaacctccggtaccccataaaaatcatcatcccctcattatcatcagcaatttggcacccctctggggggactgaggaggtacaaaaatccaaaaaaacattctctgacctctgaaggcccaatttccagaaacaatcgggaaaaagaatacattgtgttttgtcaaaaaaaaaccaaacgcgggttcaccccaaccgaaatccacaaataaccattcccaaacaaaccccgtggccattgatcaattatgggctccaaaatttccttagagaccaccataattg

SEQ ID NO: 14453 - DNA, 46 bp, Glycine max
  Coding DNA Sequence Number=SeqID_4674
actgcttattgctctggtcagcattgtatcgttccgttgtgttggt

SEQ ID NO: 14454 - DNA, 463 bp, Glycine max
  misc_feature (107)..(107): n is a, c, g, or t
  misc_feature (253)..(253): n is a, c, g, or t
  misc_feature (277)..(277): n is a, c, g, or t
  misc_feature (345)..(345): n is a, c, g, or t
  misc_feature (361)..(362): n is a, c, g, or t
  misc_feature (364)..(364): n is a, c, g, or t
  misc_feature (367)..(367): n is a, c, g, or t
  misc_feature (372)..(372): n is a, c, g, or t
  misc_feature (374)..(376): n is a, c, g, or t
  misc_feature (393)..(393): n is a, c, g, or t
  misc_feature (428)..(428): n is a, c, g, or t
  Coding DNA Sequence Number=SeqID_4675
ttctatattgtgttgagatcgtttcatcattactcctattttgctgttatcggcgttgtcgtattcctatctttgccaggtcctcactcatctcttgacagtatacntgttcgcggccactccctccgtcgtccgctccgcgacgcccgcatcagcgtcttctctgcctctctctcctcatcctcgatctcgtgagtaagtagattaagatgtgtgagtgtagtatagcgagatattgagtgatcgcactgcntcagagagctcgtcatctagcacnctagctctacgcgctccctctttctcgctcgtgttctcgctcgctctcgtctctctctccttcaggcncggggcgtgcgccgcnncntcnacgantnnnagacatccactcccganccaggcgccggccgctggcaggcaccatgtgccancgcagagcgtagcagaccaccagcgcagcaggaga

SEQ ID NO: 14455 - DNA, 287 bp, Glycine max
  Coding DNA Sequence Number=SeqID_4676
atctctggtgctgaagacatccacagtgtagagatggacaatactctttactcgcgccctgcaatactggaagcatcaatggttgcaagggcatatgacaaatggggcgagtctccctgcgcttttgtgagattaaagccgagagtggatatcagcaatgagcggggctgtcttgatgatatactagaggtctccagaggcgatgtgcctgctcatagggttacgcaagcaattgtgtatgatgccttacatcatacgggtgctgggaagaggcacatgcatatgct

SEQ ID NO: 14456 - DNA, 525 bp, Glycine max
  misc_feature (26)..(26): n is a, c, g, or t
  misc_feature (37)..(37): n is a, c, g, or t
  misc_feature (40)..(40): n is a, c, g, or t
  misc_feature (98)..(98): n is a, c, g, or t
  misc_feature (143)..(143): n is a, c, g, or t
  misc_feature (200)..(200): n is a, c, g, or t
  misc_feature (203)..(203): n is a, c, g, or t
  misc_feature (260)..(260): n is a, c, g, or t
  misc_feature (275)..(275): n is a, c, g, or t
  misc_feature (284)..(284): n is a, c, g, or t
  misc_feature (298)..(298): n is a, c, g, or t
  misc_feature (314)..(314): n is a, c, g, or t
  misc_feature (322)..(322): n is a, c, g, or t
  misc_feature (368)..(368): n is a, c, g, or t
  misc_feature (372)..(372): n is a, c, g, or t
  misc_feature (387)..(387): n is a, c, g, or t
  misc_feature (396)..(396): n is a, c, g, or t
  misc_feature (409)..(409): n is a, c, g, or t
  misc_feature (436)..(436): n is a, c, g, or t
  misc_feature (438)..(438): n is a, c, g, or t
  misc_feature (448)..(448): n is a, c, g, or t
  misc_feature (450)..(450): n is a, c, g, or t
  misc_feature (455)..(455): n is a, c, g, or t
  misc_feature (457)..(457): n is a, c, g, or t
  misc_feature (460)..(460): n is a, c, g, or t
  misc_feature (463)..(463): n is a, c, g, or t
  misc_feature (476)..(476): n is a, c, g, or t
  misc_feature (489)..(489): n is a, c, g, or t
  Coding DNA Sequence Number=SeqID_4677
agacgcggcatacagcgcgtcatcantaacgagatancanatgatagtatgactccacccagctcccactcactcatcctcactacaacgtatagtanctacatatgctcgtgcgtctcgactacgcagccagacagaacccnagtacgacgtggcgcagctgcatttcgcgacgatagctacaagacaaatacctacangancgactatactaatgacgatgtgtcgatatgagatgtgcagtagagatgacgtgtagnatactacacgtgagnagacgctantgtcgaaagcggcntgctgtggtgacagantccagcantgctctactctcgcgatcgatgcgacagtcggcggtagctacagantacntatgagatcgagtgncactgtaancgacatgacgaantacgaccatcagctagcgacgtagcangncatcagtacnangtagntncgntantcactgacagacntagttttaacganctaaaacatgccgtacactagcatgctcacgactag

SEQ ID NO: 14457 - DNA, 583 bp, Glycine max
  misc_feature (68)..(68): n is a, c, g, or t
  misc_feature (118)..(118): n is a, c, g, or t
  misc_feature (141)..(141): n is a, c, g, or t
  misc_feature (160)..(160): n is a, c, g, or t
  misc_feature (224)..(224): n is a, c, g, or t
  misc_feature (247)..(247): n is a, c, g, or t
  misc_feature (406)..(406): n is a, c, g, or t
  misc_feature (437)..(437): n is a, c, g, or t
  misc_feature (493)..(493): n is a, c, g, or t
  misc_feature (497)..(498): n is a, c, g, or t
  misc_feature (538)..(538): n is a, c, g, or t
  misc_feature (554)..(554): n is a, c, g, or t
  Coding DNA Sequence Number=SeqID_4678
cctacctttcttattatactctctgcccgcatgatggagacctgcctatcgactctcgcgatcatacntcaagcagcacatagctagatgtcatcgtctagatctatgataccactcngctcgcacctgtgacactttacnagtgtcgactactatctcnctctatctcacattgcgatacacactgctatgcgtagactagctcactcctgtgccactctacngatatgctacgctagagcacatngctggttagcgatacacgcacgtgacatgaagcacgctggctcgctgaacgcgcgcgtcgactctgtctgctctgcgcgtacgctactctacatataccagacagtagcgctgcgtagcctgttgctcagcactactcacacacacttcacgctgcgtncactgtctgagtcgagatatcacactgcgcnctgctgccgatggtactgagctcacgcgagccacagcatcatcagattgatgagtntagnnagctgaactacacactagctgcagaggaacgtgctgttgnggacgacagacgaccngcatgtctaatcccgtgcgacgtattata

SEQ ID NO: 14458 - DNA, 593 bp, Glycine max
  misc_feature (174)..(175): n is a, c, g, or t
  misc_feature (354)..(354): n is a, c, g, or t
  misc_feature (359)..(359): n is a, c, g, or t
  misc_feature (362)..(362): n is a, c, g, or t
  misc_feature (513)..(514): n is a, c, g, or t
  misc_feature (516)..(516): n is a, c, g, or t
  misc_feature (518)..(518): n is a, c, g, or t
  misc_feature (520)..(522): n is a, c, g, or t
  misc_feature (526)..(528): n is a, c, g, or t
  misc_feature (536)..(536): n is a, c, g, or t
  Coding DNA Sequence Number=SeqID_4679
agtggtgtctcttatagggatgtaatatgatgtattgaaatcttaatattacacagtatcttgtgatgatttgttatcgctgtgtgatgcgggagggcgcgtgccataaatgagtgtggttagacgctgtgtataaagtcatagaatagaaagaaacgacagatatatatgaanncaaacagcgcatagagcgaacgatgcccctctcaacgtaacgaatgacgtgatagaggtgatgttggtgacatcgcgcgttgagatgtatttatttaatgggtagtgttatagatgtatgttgtgttcgctaagtgttctctaaatatcagtagtgcacagtaaaaaacatcactaatncattnaantttatctcctctagtaatgataacacgctttgcggggtagagataatcacgagagatgataggtgaggagaaggcggagcggtggtgtatgcggtgtggtatggggtgtgtatgtgtagtatttatgaaagtgggagggtgcgtaaccagnntntntnnntttnnntatatttnaattgagttggattatatattctggtatttttcgttttaatatcgagtagtgtggtg

SEQ ID NO: 14459 - DNA, 438 bp, Glycine max
  Coding DNA Sequence Number=SeqID_4680
gcatccgttgccctaattctgctctccctcaaccttcttttcttttccatggttagctctagcacccctccccgtgttgcccctccctcgatgtgtgcccctgtcaggcgaccaccgccaccaccaccgcgccaaccaccgccattgccaccgccccttgtctcgccaccgctaccaccctctaacacaatatgatcaccaccctgaggccgctgtctttggaatcaattagcgttgaaccataagttgtggacgcaaaacgacgactaccccttgcaattaagaacagaatatgtatgacacccatcatcattttctgttgtgttacttcgtatcattgtgtgtttgttcgtgtgtttaaatttaaggataattacctttcgtgcctgctacatatgcacatgcatagtttcaatggacggattctataatattacc

SEQ ID NO: 14460 - DNA, 580 bp, Glycine max
  misc_feature (183)..(183): n is a, c, g, or t
  misc_feature (243)..(243): n is a, c, g, or t
  misc_feature (251)..(251): n is a, c, g, or t
  misc_feature (253)..(253): n is a, c, g, or t
  misc_feature (256)..(256): n is a, c, g, or t
  misc_feature (274)..(274): n is a, c, g, or t
  misc_feature (289)..(289): n is a, c, g, or t
  misc_feature (315)..(315): n is a, c, g, or t
  misc_feature (321)..(321): n is a, c, g, or t
  misc_feature (326)..(326): n is a, c, g, or t
  misc_feature (329)..(329): n is a, c, g, or t
  misc_feature (357)..(357): n is a, c, g, or t
  misc_feature (406)..(406): n is a, c, g, or t
  misc_feature (465)..(465): n is a, c, g, or t
  misc_feature (530)..(530): n is a, c, g, or t
  Coding DNA Sequence Number=SeqID_4681
tgacaccgtggcctacacgagataacatctgctatgtgctgcgaccactcacggacatccatgactcagcgactatagtgtagtatgatatgaataagtacgagcatagtgccacagcgacgatacactctttgacataccgtatcaactctcatgacatgtcgttcacgcacgcgacagtgnacgctcatctctctcatacgtcgtacgtgctatcgtgcgcgcgcacaccgactacagcanactgcatncntcncgtcgcgatcgttcacanatgaactctctacantatctatcatctgatcagactcgatntctctntgtantanctactcgatctctcatctcaattaattnatatacatatatacgtctacaaaagtatgacattgtgagagaatcgtangtgcatagtctacgccgggatgcaaccgataaggataaagcctactgcgccactgatcnagtctacatctgatattacacgactagacgataggtcgttgcgagcagacgacagagcgtggctntactctgtctactggacatttctcatcaacgaacgtcactgcaatcagat

SEQ ID NO: 14461 - DNA, 558 bp, Glycine max
  Coding DNA Sequence Number=SeqID_4682
cgccatcctacagttttttaacgatatcaatgacaagttccaaaatgcgacacacgctgttgagggcatcttaggcgtggacattccctctacccaagcagaggtcaagacagctcttgaagacaacttgaacaagctcaagtcaaatgctgaacatttgcaaaagaagctgggagagtacagcagctctggcaacaccacgctctcaggactgctgcagcaagtccagacccaggtcaatcaaaccattgaagacctcggaaagcgaaaccctgaaaccggcaaacttctggagcagataaaaactggttacaacgatctgttgggcgtgagcaagaggatgcaggaggtggtggagcagcaggcaggtagcgcctctcaggacctcaagggcctggcacaacaggcgcgctccgagctccaacgcgcaactactcagctcgaggccaagattcatgatttagtggcggacaaaagcaagacttcctaatcatgcactcgaggtcttgctatctatcaccactaacagctccatttcctcagattattcctttcttc

SEQ ID NO: 14462 - DNA, 533 bp, Glycine max
  misc_feature (79)..(79): n is a, c, g, or t
  misc_feature (215)..(215): n is a, c, g, or t
  misc_feature (237)..(237): n is a, c, g, or t
  misc_feature (253)..(253): n is a, c, g, or t
  misc_feature (392)..(392): n is a, c, g, or t
  misc_feature (411)..(411): n is a, c, g, or t
  Coding DNA Sequence Number=SeqID_4683
gtagtagcagatgtcgcagagtatcttacagcgctaccatatcgatacacgagtgtagatgcatcagagtaagctatantaccgatctcactctgcatagacagtatatgagacatgaatgtctatatgatacgagatcacgcgtgagatagattcatattcatttgtctatgtgtgtgtaggttgtaatggaatggatacgaggacatgcgtantcacatctcgctcgcgtctganttgtctcatgatgtanagtatatagtagctctcgttgtcatagatgcaacctcattagtgctcgcgctagtccgatggccgcgcgggcaagagcatagagcgaaatatggactatgtagaacatagccaacatataggtgtcgcttagtggaganacaggtaatatagagacangggatgtctgctcgagtcgaagacgcgcgtaggggaggattctcaagcatatgtcatgctgaggatcgcggcgcgccgtctccgcgggagcgagggagaggccttcatacgcatatgtacga

SEQ ID NO: 14463 - DNA, 466 bp, Glycine max
  Coding DNA Sequence Number=SeqID_4684
taaaccgccgggtacgcgagtcacagtggttccgcgtgcaggccttcgtgtttcttagtcttccactttgccttatcataaactttcctcttctggcatacgctatcggatgcattggaccatgcagaaccctcaacgactgcgacggccaactcatttgcatcaacggaaggtgcaacgacgaccgcgacggcggagcccacatatgcggcggcggaaggcctctcaaatccgccaccacgcggtggaagctgccagtcctcgggaaccctaaattgctgcggataatcgtatcctcagtaccgttgctctccgccggttacttgctctacgccggcgatcctgacgctgaacgacttcaccgaatgctgcgacggacgggacccgtcgcagcgctgcgagaagttccataccttcacggagcgggtggaggcactctcctctgggtggctcgacggcggttggc

SEQ ID NO: 14464 - DNA, 506 bp, Glycine max
  misc_feature (182)..(182): n is a, c, g, or t
  Coding DNA Sequence Number=SeqID_4685
ccgggctcaggtaataacacacaagtggtaatcaatataatgtctgttagctgtgagtgctgaaatgcaataacaggtttcataataagggcttgcgaatcaccgcgaccactatactatagactctctctttgtcactaatcagctaggctactccccacctcgcgttgcctagtcagcancaatgcgcattcagctccagcgaaactgacccccagcgcggagcgctcgcaacacaggttaaacatcttcgaactctctcaatacaagaattattaataataaattactaactcagtagctttgtttacaaggctgcatgtaatgatccttatagagactacgagaaggaatacggggataaggcacataagcaacaatcaccatcccactgttccctagcaaacgacctcccctggggaggtggtgggtcccttttccgtattccctgcacccaggaaggggagggggcccccggccccaccctatgacggaggcgaacgatc

SEQ ID NO: 14465 - DNA, 568 bp, Glycine max
  misc_feature (33)..(33): n is a, c, g, or t
  misc_feature (43)..(43): n is a, c, g, or t
  misc_feature (93)..(93): n is a, c, g, or t
  misc_feature (326)..(326): n is a, c, g, or t
  misc_feature (523)..(523): n is a, c, g, or t
  Coding DNA Sequence Number=SeqID_4686
ggatagaaagcgagccactgaggcagaaatatnaacacactanctcatacccaccccccacaccccccccctctctcacgactatcacagctncttgcttgtcacgtccttcctactctctgcttactcctctgttagtcatataatcgacatgacaccaccctaccactcgctctacgcacacgccgtgtgagaggatagagtccgctcgcgcgccgcgacatacgtccgcgggcgtaccgtgcgcagcagcgcagacgcatgacgacgggccgcgctagatggcgtagcagtacacccacgagcgctgtgtgtaccaccaccancatcacacgctgatgagtcgctagtcgtcgcgcagggagccgtcgcagcatcggcggctcgacgacggagttcgagccttgtgtatacgtcgtgtgcgtgacgctgtgcatgctgcgtcgagctgtgtgcactgatcataccaccacgcaatacgacacacccaaccagctacgtcatgcgcaggacgcactacatncatgacactatagcgtgagtgtaatgacatgtctcaccacacgac

SEQ ID NO: 14466 - DNA, 298 bp, Glycine max
  Coding DNA Sequence Number=SeqID_4687
ccgttcgaaacaaactgctcggaagtgcacatgaggaaaggctcctaagaagcggttcgcatccaaggctgcccgttactgtgcgccaactactggtggtgtgaagaagccacatcgctatcgttctggtaccgatgctcttcttgagattaagaaataccatatgagtaccgagcttttgatcacgaaggttcccttccaaaggctggttcgagaaattgattaagacttcaagactgatctgcgttgccagagccttgctgtgcttgcattgcgcgaagctggtgaggcatacctt

SEQ ID NO: 14467 - DNA, 404 bp, Glycine max
  Coding DNA Sequence Number=SeqID_4688
acatgaaggacgtcttgggccacaagagatgcgttcctttcaccagattcagaaaccacaccggtagaactggtcaagctaaagaattcggcttcactcaaggtagatggcccgaaaagtctgtcaagctcatcctcagcttgttacaaaacatccaatccaacgctgccgtcaagggactcgaagaagacaagttggttgtgagccatgttcaagtcaacagagctcaaaagggtagaagaagaacttacagagcccacggtagaatcggaccttacctttcctcaaactgccacatcgaattgttctgcaccacccaagaaactgacgtcaagaaggaagccaataaaaacgccgtccccagacttagcaagaaacaaatcgccaagactagactcagaact

SEQ ID NO: 14468 - DNA, 521 bp, Glycine max
  misc_feature (225)..(225): n is a, c, g, or t
  misc_feature (228)..(228): n is a, c, g, or t
  misc_feature (281)..(281): n is a, c, g, or t
  misc_feature (292)..(292): n is a, c, g, or t
  misc_feature (302)..(302): n is a, c, g, or t
  misc_feature (383)..(383): n is a, c, g, or t
  misc_feature (395)..(395): n is a, c, g, or t
  misc_feature (413)..(413): n is a, c, g, or t
  misc_feature (463)..(463): n is a, c, g, or t
  misc_feature (466)..(466): n is a, c, g, or t
  Coding DNA Sequence Number=SeqID_4689
caaaacataaccatcgcgagcgctgctatgattcgtgtacagccatctcgttgatggcgcgacgcgttgcgtctcatcttcactgcgtactattatatcaatccgcgcacacacaacgatcattatcgtccatatatcttatcaatatgtcagcgtctgtcctctactcgcatacgcggtgtgacagatatatggcgcacatgcgtagtcgctacatgatatatntanatgttgtatcacatacatgatcactgacatgcgcacgttgtatgtatatatantatctctattnagcgtgtcgncgtctcatctcgagatctcgcgcgccaccactatcgctgatcggtcgcgcgtgatgactggtgcatctcactcgcgagtcncactacgatctncgcacgcgagttggttgnccgcgcttaggctctgcgctgcccatcgacgacgacgagtaccagcacgnacncgacagcgtcgcgtcgtctgataagcatcagtactactgatatgagtgctcgatc

SEQ ID NO: 14469 - DNA, 474 bp, Glycine max
  misc_feature (134)..(134): n is a, c, g, or t
  misc_feature (207)..(207): n is a, c, g, or t
  misc_feature (299)..(299): n is a, c, g, or t
  misc_feature (321)..(321): n is a, c, g, or t
  misc_feature (361)..(361): n is a, c, g, or t
  misc_feature (415)..(415): n is a, c, g, or t
  misc_feature (446)..(446): n is a, c, g, or t
  Coding DNA Sequence Number=SeqID_4690
gtcgcgctcgtcagactcgccggtgatcggcgctttgtcgacagagcgcgtgaatgcgtggtgcgccgtctcgtcggtctgcagcgagctctgcgggatgcaagtgggcgagcttcaggcatggctacgggcgngccactcacgcgggtcggcgatgcgcggtggcgcggcgcgtcgcggcgctagcgagctcatcctatcgtctcnccctactccgcacctcgcctaccatcatcactcggctcacacacgaagacgagcacgaagacgaagagaaatgatagagtggtgtagaaganagagaggtagctagagagtganaggcgatacgcgccccacacaagcacgccagctccgcgcncgaccgcgctatacactacgtgcgcgactccgccgcgcccagcgtcgcaccgcnctagagatgagagctgaagaggatgatcagngcatgctccacactacgtcagcgtgaca

SEQ ID NO: 14470 - DNA, 364 bp, Glycine max
  Coding DNA Sequence Number=SeqID_4691
gcctttacccttcccttcacagaagcgtaaaaccaaaaggcttgactagagaaggagagagagagagcttcgaatcgaaactcagaagtagaaggaagcacaaatcacaatcgctatggctaggtacgaccgagcaatcaccgtgttctcccctgtcggccatctctcccaggtcgagtacgccctcaaagccgtccgcaagggcatcgccgccgtcggcgtccgcggcaccgacaatgttgtcctatactaagaaactacaaatccaccgtcaaactccaagactccatgtcggtgaggaagatattgtttcagaactaccactttccatttccttgagctgggccttaaagccaacattata

SEQ ID NO: 14471 - DNA, 467 bp, Glycine max
  misc_feature (29)..(29): n is a, c, g, or t
  misc_feature (38)..(38): n is a, c, g, or t
  misc_feature (49)..(49): n is a, c, g, or t
  misc_feature (52)..(52): n is a, c, g, or t
  misc_feature (56)..(56): n is a, c, g, or t
  misc_feature (58)..(58): n is a, c, g, or t
  misc_feature (65)..(65): n is a, c, g, or t
  misc_feature (72)..(72): n is a, c, g, or t
  misc_feature (80)..(81): n is a, c, g, or t
  misc_feature (150)..(150): n is a, c, g, or t
  misc_feature (205)..(205): n is a, c, g, or t
  misc_feature (234)..(234): n is a, c, g, or t
  misc_feature (250)..(250): n is a, c, g, or t
  misc_feature (254)..(254): n is a, c, g, or t
  misc_feature (256)..(256): n is a, c, g, or t
  misc_feature (259)..(259): n is a, c, g, or t
  misc_feature (276)..(276): n is a, c, g, or t
  misc_feature (287)..(287): n is a, c, g, or t
  misc_feature (291)..(291): n is a, c, g, or t
  misc_feature (318)..(318): n is a, c, g, or t
  misc_feature (327)..(327): n is a, c, g, or t
  misc_feature (341)..(341): n is a, c, g, or t
  misc_feature (399)..(399): n is a, c, g, or t
  misc_feature (414)..(414): n is a, c, g, or t
  Coding DNA Sequence Number=SeqID_4692
cgcgtcacatatgcagatatgagctgtanttatatatnggatgttgcgngtntgtntnatgagtnttgactnctctgcanntatcgtactgcgtcattgcgtgctctatcattactgtctatcagctatgtgtccgtatcttgtcgtcantaattgcaccacggcgtgtgatagtacgcgttcgctccatcctacatccgctcgncatcttcgtgcagttattacgatacagtntcgctcatctctcctncctncnatnagagtggtggtgtgcgncgtctacgaanaatnccatccaccacatacaacacaccatcncacggcggngcagcgtagtcgtntctgtcatcatgagctactcactatgatagatggttgtatgatatgatgcgtgcgtancttctccctcacttnttatgtctgtgttatgtattattgtacatggtcgcagttgtgtcctatcctca

SEQ ID NO: 14472 - DNA, 264 bp, Glycine max
  Coding DNA Sequence Number=SeqID_4693
aaaacctgaacatcttccccattatgggaaccagtttgaaagaaacgaaaacccccgacggaaggaattggagatttttccagcgacgaaagcgcgatcttaggcgtcctctcggaaccagtcggtggcggagaccacgttcggcatggaggacgaaatccggtagctccgaagcacgtttcgagctgtcgtcgacggacctcgacaaggctccgcggtagcttctcagatcggcgtccgtttcggcatctccgtcgtcgtctt

SEQ ID NO: 14473 - DNA, 402 bp, Glycine max
  misc_feature (163)..(163): n is a, c, g, or t
  misc_feature (200)..(200): n is a, c, g, or t
  Coding DNA Sequence Number=SeqID_4694
tttagcacacaaatttcccaccaaagtcctaactacaactactaatttcttagcttgtaatttgggtatttcatcatctaatgtttcaattacatttaaaaataattccacttgtcttttcaattctttggtattagaaataatattgtctacttcttgtggngggtacattccactgcagatttcatcagtgtatttanaaatcatatcagccaaaattaaactctcttctaatttatccactactcccaattcgctttcaattttattattatttgtttcatttaattttaaactcactctctctaaaagagtgtaatttgcttttgcgaattgagaaacaggtcctactctgtttttctcttctggggaaagttcttcttcttcgaaatcatcctcact

SEQ ID NO: 14474 - DNA, 349 bp, Glycine max
  Coding DNA Sequence Number=SeqID_4695
tcatttcacttcactgcgcctcccacactcaacaaaacaagagccgaaaccacaaactctaacaaccatgccgcccaagttggacccgagccagatcgtcgacgtctacgtccgcgtgaccggaggagaagtcggagccgtcagttccctcgcccccaagatcggtcccctcggtctcgccccaaagaagatcggagaagacatcgccaaggagacagccaaagagtggaaaggactccgcgtcaccgtcaagctcaccgttcagaaccgtcaggcgaaagtcacggtggttccgtccgccgctgctctcgtcatcaaggccttgaaggagccggagagagacaggaag

SEQ ID NO: 14475 - DNA, 392 bp, Glycine max
  misc_feature (223)..(223): n is a, c, g, or t
  Coding DNA Sequence Number=SeqID_4696
actcacaaagcctcgatgtatggtaattatatcttccctcaaactgaaggcacaggcctcccaaacccttcaccctacttctgctcaaaccttggttcttctccactaccgactaactctttgtttacaaactttgctattccatacaggtcccaagctgagtacattcgcccgtacctaagaaaagcctcaagcttttcactctcagactcatacccttgtntactctgcacacacagcactttggtaccactgttgtgtgccagatatcacaatctctgccgctgaaacacactcccatcagctaaaccgtgaaagctcataatacagtgacctcagtggcactttggacattacctactccaacctaaggatgtgtctctcaagaggaa

SEQ ID NO: 14476 - DNA, 259 bp, Glycine max
  Coding DNA Sequence Number=SeqID_4697
tttttaccgactctgcttttactctcttcgtttatttactactttttcccttcattttttttataagaacacttgaaaaactgacggaattcacttgtgaaattggagttttaatttgcaatattttggattggagatgccagatgaagatgattttgattgatgagaatcgatcttagaatttccttgtattgatatctggattgtgacttttcattggttttttgaaaagtagtttattgtttcattagtgagatag

SEQ ID NO: 14477 - DNA, 578 bp, Glycine max
  misc_feature (60)..(60): n is a, c, g, or t
  Coding DNA Sequence Number=SeqID_4698
ttgcttgcgtggtttcactccaaattcagcaaccgcaggggccgaagcatatatctaagnactcaaaagtgggttttctgactacatggcctctggaggggaattggcttacaagcagctctgcagtgaaatcacaatagagtttaacaattgctcgaaaaaagtcctttgaaatggagtccctgtttagaagccctgaatactgccgagttgatctagcgcagcttcttagagctgttcaagatcaggaaaagccagaaccttcactgactgccaccattcaggtgtttaagaaagccggggccccatctgatcgtctggtaagcccttagacttgccaaatgtccatgccagcagagcatgagtgcgttcatgtttaggagaatacagaagcttctggtactgagaagcttgcacatatgcttggtatggcagtgcgtctacagaagctatagaggtgtccagaatgctgcgtggccgatagtaacatcgtgaagaaagcaatgatgagattgctgccttggagcgaagtgatcctgtgcacttatttactagccatgttggacttcattcttatt

SEQ ID NO: 14478 - DNA, 521 bp, Glycine max
  misc_feature (77)..(77): n is a, c, g, or t
  misc_feature (116)..(116): n is a, c, g, or t
  misc_feature (163)..(163): n is a, c, g, or t
  misc_feature (205)..(205): n is a, c, g, or t
  misc_feature (320)..(320): n is a, c, g, or t
  misc_feature (374)..(375): n is a, c, g, or t
  misc_feature (435)..(435): n is a, c, g, or t
  misc_feature (447)..(447): n is a, c, g, or t
  misc_feature (470)..(470): n is a, c, g, or t
  Coding DNA Sequence Number=SeqID_4699
tcgatggttcgagcagcgtcttgtatattgtatactgagtcagggcgaatgtcacgcgtaatctatcattcacgtangacggcaggccgacgggagagcgagtatgacctccagcnagatgaatataagaatatattataaactatagagatagacagtagantgtatatattactatattttacctcctccccacccaccaccnccaccacgccacgcgcgcgcaagagacagcgcgtgagtgaggccaagcacacctacaatgcagcgatccacacaggcagatgcaggagaggggcacacacagcgcatgaacaacnagaacattagccagacgcagccgcagcggcgagctgggaaggccgcagcgcgcnncgctagcatatataagatataacatcatgtagatcatatatcgtttcgcgcccattgatngtgagataagtntatcggcagtgtcagtcttactnactgcctacctatgtgataggcacataatcatatatacagcgggtgggagt

SEQ ID NO: 14479 - DNA, 453 bp, Glycine max
  Coding DNA Sequence Number=SeqID_4700
aatatcaacgctgctcaagctgtcgctgatttagttggtaccaccctcggccctagatccatgttaaagatgcttatggaccccatgggaggcatcgttatgaccaacgacggtaacgctatcttgagagaagtcgatgttactcaccctgctgccaagagtatgattgaactcgccagagctcaagatgaagaatgcggtgatggtaccacttccgtcatcattttgaccggagaaatgatgactgttgccaagccttttatcgaaaaggatatgcatccttccgttgtcgtcggagcttactatagagctcttgaagaaggtattaagatcatcaatgaagtcgctctgcccattgatatcaaccaagacgaagaagtcaagaaggccctcaagagttgcgttggtaccaagttctcttccagatggggaagtctcgttgttgacctcgcc

SEQ ID NO: 14480 - DNA, 542 bp, Glycine max
  Coding DNA Sequence Number=SeqID_4701
cacatttgggcctgttcctagtttttgttggttggtggggccttgctgagcacggggtgggtgagggccgctttggctagctttgcggaggcatgggtggtggtggtgccctgctcagagaggtgatgatgggggccgctgacgcgtgctttgaggtggcatcggatgtgtggcggaacctctcattgtctcatgcctctgctgccgttctagtcatcagtcacctgcctgacgccttcgttggcacgtttttgcgtgcgggggcttactggaaatgcgttggccacgctgtctcgccatttagtcgtcctagcctctcgcccgaggctccggctgaaggctttcgtccccctcaattcatgctcggggtcgggagacccttgggatttagcaggtgggcgccgcaggcaggcccgtgcgccccctcatgtcgacggtcatgtaccaggagactatgtggtcgaggctgggctgttggtcactttcttgggatgcgccctgcaccccccccctgccctgagtcggccgatcaattgggctga

SEQ ID NO: 14481 - DNA, 215 bp, Glycine max
  Coding DNA Sequence Number=SeqID_4702
ggactcggagagtcccctataggacacctgatgaaggaactaggcaatgggctgatgtgtggaacacccttcatcgggagcgtgttatctacatagcacaagaaatagatgaagaatttacttaccaaatattggctactatgctttatcttgacaggatacaaaactgcaccaggctttatatgtccatcaatggccctgacggtgatctgcac

SEQ ID NO: 14482 - DNA, 528 bp, Glycine max
  Coding DNA Sequence Number=SeqID_4703
aaaagtgcgcgagggccttaaggcaaccagcgggcgggcggggcatgggttagtgccgaggtagcgggaccgattccagccggcgggtcgtgggtagggatgggccgcgggagtgggagggcgtgtttggaaagggttcgtgagggcggtgggggaggccccgtcgtgggatccgccgccgggcggttcgcgtgccgtggtgttgcccgggccttttgttggtgggcgttatccggggaatgttggggcgcctgttgtggcgggtgaagcgtggtttttgcgggctttgtgggggcatgacgaggatccggtctcggtgggcgcccaaggcggggtgcccagtgagggcgggagggaaagcccggaagaggggggtgcccccacgttacgccctaggccgccctttctgcgggcgccgcgtttgggccgggtttccattaatttccagctgggcgtcgaccaggtttttttccggcctgggaaaatcggggcagtgaagcgcccacgcaacgtaatgggagtttaggt

SEQ ID NO: 14483 - DNA, 299 bp, Glycine max
  Coding DNA Sequence Number=SeqID_4704
gtccaaaggaggaccaccattggttaccccaaaagtgggggattccactggggaggcaccagccagcaccccaaagagggggttcctaggcaaattcaaaggccaagatccatggtggggggggcccctccgagggggagaagaagatgaagatggtgaagaagcagaaggaggatgtccatgaccatggccatgacagcatcaccagcagtgacagtgtttaaactgctgcgtcgcctatatatataaaagctttatgggaccatagtagagagggctgtaccctaaggtctctctct

SEQ ID NO: 14484 - DNA, 531 bp, Glycine max
  misc_feature (414)..(414): n is a, c, g, or t
  Coding DNA Sequence Number=SeqID_4705
ggcgaacaacgcgacacgactacttatatacgggatgcacgcatgtatgagtgtacatatatgcgatacagcgctgtaatatattagcaatgattacttataatatcaccgtcgggcaacctgactacattctccaccgtcatatcatggtgcggttttctctcgtttatttgttgtcttctattcaatatttgatttattcgtgtgtgcaaagaacatataatataccctttcactatctatcattcaatacgtcggatacgtatatatacagatagtcgtagccgtccggtctgttctctacttattgcgtgggaaaatcatcgtggggcgagcgggtgttatatgtagttttattattattgtgagagataatttgttgcgtttcgtgtgctctctcagtcggttggtgtngtgtgttgtgtgcgggtgggtggggggcggcgcgctgcgggtgagggagtcacacaccaatacagcataatcatctaatatgtttttcgctgtagtacctgctcctactactggacg

SEQ ID NO: 14485 - DNA, 352 bp, Glycine max
  Coding DNA Sequence Number=SeqID_4706
tgaggccccaggagccgacggacttgagtcaacaatgcgccgcgtacacggagacgcgggcgctcgagaagaactgactagggcggattcaacaaaagtgcgcctaagaaataatgcactgggggggtcgtcggagttgctcccggccggctggcttgcgcgggccgccggtgaagtgatttgggcatgaacgcagcggaaaggggctggactggatttgagcaagtcaatgaaaccggattttccacggccttagccggcgatgcgggcccctcgcctctccttttttttcccgcgttagtgtcagttctgtatgagagcgaatttgcaaagaaaattgcactgggttcgt

SEQ ID NO: 14486 - DNA, 456 bp, Glycine max
  misc_feature (42)..(42): n is a, c, g, or t
  misc_feature (50)..(50): n is a, c, g, or t
  misc_feature (53)..(53): n is a, c, g, or t
  misc_feature (60)..(60): n is a, c, g, or t
  misc_feature (95)..(95): n is a, c, g, or t
  misc_feature (120)..(120): n is a, c, g, or t
  misc_feature (123)..(123): n is a, c, g, or t
  misc_feature (206)..(206): n is a, c, g, or t
  misc_feature (211)..(211): n is a, c, g, or t
  misc_feature (217)..(217): n is a, c, g, or t
  misc_feature (334)..(334): n is a, c, g, or t
  misc_feature (402)..(402): n is a, c, g, or t
  misc_feature (405)..(405): n is a, c, g, or t
  Coding DNA Sequence Number=SeqID_4707
tatagtgaccgacacaacgaccgcacagagagccaacaatcngcagcgcnacnatatatnaaagtaggacacgacatcaacatacacgcaaaccncataccaagcgcatcaactgtatgntcnactcacgcccacgtactcaacccgagtcacaaagctattgataaatgacacggcgtgtatgctcactattatcacttcatgantatgngctctncgatgactcacatcatctcctacacgccgcagtcgaatgtatatcgactagtcactgcgcacgcgtataccgagtcattcgttctcgtcgatatgcatcgtaggcaggcagcgcacnctcatttaccaccactatagatcctaggttcacggatgacatactctattagacaccagcagttacanctncatcactaagcagacgcgcgctcggcgaccgatgcgaccaggaccatgaca

SEQ ID NO: 14487 - DNA, 368 bp, Glycine max
  Coding DNA Sequence Number=SeqID_4708
tatcttatgttcgtagatgtacactgacctgtaaagttatgtggacatcaatatggattctggtccagttgcaacattccaagatcacgagtatttaaggccagagctttgtgatttatatgaaaatgattcaatttttgattatacgagtgttgactaagtggtgatggattgcgtgtttcaactggttcttacagcaatctattccgtgtgtttggtaagtgcccctggaagtactgacgctatgactttggaagccagtaaaaatccaatgaggcgctaagttccaaccccttcaaggccatctagatcacagggaaacagtataacacgagttgtgagacgcggaacataaagtgccagtgtcg

SEQ ID NO: 14488 - DNA, 538 bp, Glycine max
  Coding DNA Sequence Number=SeqID_4709
atcgctgtgggtgttgtcgctgtcacacatatagaagatgtggtacacacgcgccacagcctttttgtgtgtgtgccacagaagaaggctctcgcacacattctaacacatatggcgccacatgtcttgtgcgaccgagatgtcgccgcttttctagaggcgcacaagatagagcacatccgcggtctcgagcacaaagatcttcttatggatctccctctgtgacacatgcatatagagaagcgctatctccacaatctcactcacaacacgcacacaggtggggagagccctttccgtgtctccccttgagaaacacagggccgccacaagcacaagcgcgcgtctcgacgccacaaagaccctcttgtgcacatataggagagcgcgcgccacattctacacaaagtggaggaagagtcttcgagagcactatattcaatatacacagagtggaggaggagagttatatgctcttatatctataatataatctgcggaatatatgggggggtgttattctgttccgcggtgtttc

SEQ ID NO: 14489 - DNA, 267 bp, Glycine max
  misc_feature (30)..(30): n is a, c, g, or t
  misc_feature (66)..(66): n is a, c, g, or t
  Coding DNA Sequence Number=SeqID_4710
tgcatggttcgctgagggtgtactaatccnttggatacggccaagtgaagcttcagcttcaaagcnagctgaactggggaaggttgctccctaccaaaataaagggatgcgggaaaagttggaaccatgcacgggaaaaaggcttcacactctggaagggatgtggcagggtactcctccatgttgtttgtaggctaaaaattggggtaatgaaccggtaagacttttttgtggggaagaccgctggtagaagtttcttggtcgaaa

SEQ ID NO: 14490 - DNA, 417 bp, Glycine max
  misc_feature (107)..(107): n is a, c, g, or t
  misc_feature (145)..(145): n is a, c, g, or t
  misc_feature (363)..(363): n is a, c, g, or t
  Coding DNA Sequence Number=SeqID_4711
gtcagctctcatcgctcgtctgcatcccgactctgctgctacccgcatatcattctattatatataaaattaacttaaacacaacagcaacacagcattacaagcangtgcacgtgcgtgcgcgagcggcgcgtgtcggcgtgcngtgtgatgaacgagagacgacatagagtcgctgagatacagagatgtattaatagagagagagagaatatgagaagtagagaggaggcgtggacagcataagagacgccgccggtggcaacaaattgaagcgaagagaaggtttggtcgttgatgtagaacagcatatacaagagacagagaacgcggcagtagaggaacagtgtgtgatgcgtcgancacatactattgtcgatcgaagctcgcattgagcgcgcagagcggcagcaacaa

SEQ ID NO: 14491 - DNA, 458 bp, Glycine max
  Coding DNA Sequence Number=SeqID_4712
tcacggtacttttcactatcgctaaacacgtatacttagccttagagaatggtatccctattgccctactttttttttcaagaaaaaaagtgaaggcttattcgagcggaatttcctccactctacttactatcgcgccgaaggcgcgcagaattattgttaatgtacaggactgtcaccttctatggactactttttccaaagtattctattaacaattcatcgataggctagtccagtttcgctcgccactacttctggagtctcggttgatttcctttcctacagttacttagatgtttcagttcactgcgtatgatatattaggtttacccataggagtgctattgttgttatttcctgttctgcccccgaagggggcctagttaataactaaagaaccaatagcttttggtgtttccacctcctttcaatacgtgtttgctagacatccttaa

SEQ ID NO: 14492 - DNA, 582 bp, Glycine max
  misc_feature (112)..(112): n is a, c, g, or t
  misc_feature (247)..(247): n is a, c, g, or t
  misc_feature (253)..(253): n is a, c, g, or t
  misc_feature (530)..(530): n is a, c, g, or t
  Coding DNA Sequence Number=SeqID_4713
atattagccgacacaacaaatcttgtgttatcgctcgtatgtggtgggcgatggttgtgtcgtggcgttttctgcgagatggtgatcgtgcaccgccgctcttagttgtggnaggagtagtctcccctcttctgtgccttcgtcgcgcgcgcgcccccacgtgcagagctctgcgtacatggactagggaagggagatcggtgtggaccgcacgtcgatgacgcgacagcgcaatagctcagcaggnaggtangtggagtataccggcgaaggtcaatgaggcagagcgtgtacgattgcctgagccctgctcgtctgacctatgcgtgataacatgtacacgacatcggcgtgcctccgggaatacacgcgcaagcaacttgttccatccgcgccacaacactcctctctccacgagacaacacgttctactatgtcactgacctcgcccatccgcgagacctcttcgctcgcgctactccattgcaagagcgcaagctcggcgccgacgcttgatacacgactataanaagttatataaacactcacactgtctcgtgtgccgaggtattatccactctc

SEQ ID NO: 14493 - DNA, 551 bp, Glycine max
  misc_feature (273)..(273): n is a, c, g, or t
  misc_feature (385)..(385): n is a, c, g, or t
  misc_feature (514)..(514): n is a, c, g, or t
  Coding DNA Sequence Number=SeqID_4714
tggcacgagccgacgcatcgcgcaagcctcgctcgtactcgttgcgtgtcgcgtagtcgcctgtataggttatgatgctctggtgtcgcgtggggctgtcacgttgggtgctagtgtgagctattgaggtgtgtgtgtctatgacgatcgcatcgagtgctggtgcgtgcgtgtgttcatctcatagcggcacaacgagcgcaagaagagagagagcagagagcaaggaattttattcatttctcaaatttatttttaatatatgtattgctnaacacaagcatacatacagcgcagaaagattagaataacaaaggataatctagcatgacgatgagagacgacacaatgtcatagattgtacgagatgcgaggagtatttgtnggttagagtatagttgtcacgcaccttggcgcggcgaggaactcgttgtattgtagttagcatatatggtttcgttgacacagctctctctttgcttgccttatagcagcattatagtcacgtcttgcngtcaaaaaacgatacggccaaaactaaataatctctc

SEQ ID NO: 14494 - DNA, 283 bp, Glycine max
  misc_feature (27)..(28): n is a, c, g, or t
  misc_feature (124)..(124): n is a, c, g, or t
  misc_feature (167)..(167): n is a, c, g, or t
  misc_feature (170)..(171): n is a, c, g, or t
  misc_feature (191)..(192): n is a, c, g, or t
  Coding DNA Sequence Number=SeqID_4715
atcgtcgttccgcgccattaccatggnnaggaggagggcacggccacggccaacgccgggcagtgctccatcaacgtgctcaaccctgagggtgtgcgccaacgttctcagcggactgctcggnctccaagaccgggcgttccggtgcacgaacaatgctgccgtgnttnnccaggggttggccgactccnnacgccgccgtctgctttttggaaaccgcgtcaggccaacatcctcggctccactcaaaggtgcctgtggaaatcagctcctctccacatgg

SEQ ID NO: 14495 - DNA, 512 bp, Glycine max
  misc_feature (34)..(34): n is a, c, g, or t
  misc_feature (37)..(37): n is a, c, g, or t
  misc_feature (39)..(39): n is a, c, g, or t
  misc_feature (201)..(201): n is a, c, g, or t
  misc_feature (332)..(332): n is a, c, g, or t
  misc_feature (340)..(340): n is a, c, g, or t
  misc_feature (349)..(349): n is a, c, g, or t
  misc_feature (406)..(406): n is a, c, g, or t
  misc_feature (458)..(458): n is a, c, g, or t
  Coding DNA Sequence Number=SeqID_4716
tctctccatctctataatccattatacaacgacnatncncactacgatacgattaaatcatcactcacgcagagaactagcatgctacgtacacgatatcccatcactcatcactactctcactgacgtcactccactctacagctctaccactcctccagcactcactcatctccctgacgacacactcagctcactcangctactaactacagcactacgacacgaacaacacgacgtgactctcacttcatgctctttcatcagagatcactgttactctcctacacagatctctcatgccgatctatcgtcctcagctgatctatagncattactntctatatancaccatactacaaaataacagcaccgagcatcgatgacagacatgcagcataacgtntaaggacacatgatcaacacaaccatccacatacactactacactcctactntgacgatcgctaccctacatctcaacagcatcagtatatctatgtgccaccaca

SEQ ID NO: 14496 - DNA, 559 bp, Glycine max
  misc_feature (82)..(82): n is a, c, g, or t
  misc_feature (158)..(158): n is a, c, g, or t
  misc_feature (162)..(162): n is a, c, g, or t
  misc_feature (218)..(218): n is a, c, g, or t
  misc_feature (225)..(225): n is a, c, g, or t
  misc_feature (325)..(325): n is a, c, g, or t
  misc_feature (357)..(357): n is a, c, g, or t
  misc_feature (382)..(382): n is a, c, g, or t
  misc_feature (386)..(386): n is a, c, g, or t
  misc_feature (418)..(418): n is a, c, g, or t
  misc_feature (445)..(445): n is a, c, g, or t
  misc_feature (517)..(517): n is a, c, g, or t
  Coding DNA Sequence Number=SeqID_4717
ttagctatctgtgtgctatgcgcgcgtgttggtggatgtgtgctcttcatctctctctctccactcgttgtgatagctactnatatctactattatgttcactcgctgactcggggttggtgtgcgggtgcgtagcgtgcgtgtggctgtctcacacnctanataatgtgggtgagtacacgataacatacatacttaatcgtgtgtgtcccactctntttctantactctgtgtgatcaaaaacttctctcatacacctctgatctgtcgtctgtgggtggtctcactcttgtgtgtgtgtgggatctaatatacagcagtaangggggctgagatgaagtaagacactatcgagnacgtgttgaccacctcatacagtgngcgnggagagcgctgtcatactcccattatcatcgngctgcgacttcatgaatgtgactcttntatatcacttaactcttattatctgtgtagtatgcgttgtcgtcatctcaaatcgcgtatctcaatcatacnttccttactactatcgtcttgatgagtcatttctgtgtgtgg

SEQ ID NO: 14497 - DNA, 580 bp, Glycine max
  misc_feature (29)..(29): n is a, c, g, or t
  misc_feature (49)..(49): n is a, c, g, or t
  misc_feature (120)..(120): n is a, c, g, or t
  misc_feature (173)..(174): n is a, c, g, or t
  misc_feature (176)..(176): n is a, c, g, or t
  misc_feature (186)..(186): n is a, c, g, or t
  misc_feature (242)..(242): n is a, c, g, or t
  misc_feature (293)..(293): n is a, c, g, or t
  misc_feature (299)..(299): n is a, c, g, or t
  misc_feature (315)..(315): n is a, c, g, or t
  misc_feature (340)..(341): n is a, c, g, or t
  misc_feature (354)..(354): n is a, c, g, or t
  misc_feature (390)..(390): n is a, c, g, or t
  misc_feature (442)..(442): n is a, c, g, or t
  misc_feature (447)..(447): n is a, c, g, or t
  misc_feature (458)..(458): n is a, c, g, or t
  misc_feature (518)..(518): n is a, c, g, or t
  misc_feature (521)..(523): n is a, c, g, or t
  misc_feature (525)..(525): n is a, c, g, or t
  misc_feature (528)..(528): n is a, c, g, or t
  misc_feature (530)..(530): n is a, c, g, or t
  misc_feature (532)..(537): n is a, c, g, or t
  misc_feature (540)..(540): n is a, c, g, or t
  misc_feature (542)..(542): n is a, c, g, or t
  Coding DNA Sequence Number=SeqID_4718
gtagatacaactctcatagcagtgagtgncgccgacgagacagcgagcnaagcacacgatagtatatatgaatatattggatacgatactctagtgtttctacactatatattaacatanagcacgaagaacacagcgagagcggtcacagagtatagtcgacatcgtgagtnngntgatagcgtngcgtctcctcactgtctagggacacagtcctctcgtacacgtctacatcctgctcncatctaatatatatatgctcatctcccatacatcgatctagtatgatatgnatagtntagttcatagtgtatngtatgtgctcactcatcacagaganncgagtatacatanatagcgtcatagtctctctctctctcatgtccgccncccggcacagcgccacggagcatagtgcactactcagacctacattgtgtantgagngtagccctcgnccctctccctcacaccacgactcgcaagcacacagcacacaccactacacctctcttatnctnnnantantncnnnnnnatntnttagaggagaaggatagtcagacagctgtgagagcaca

SEQ ID NO: 14498 - DNA, 439 bp, Glycine max
  misc_feature (89)..(89): n is a, c, g, or t
  misc_feature (125)..(125): n is a, c, g, or t
  misc_feature (127)..(127): n is a, c, g, or t
  misc_feature (198)..(198): n is a, c, g, or t
  Coding DNA Sequence Number=SeqID_4719
agaggagcacggacacggcaacaaagaagagaaccagcgcacggggggcaaaacgacccggacccacgcgggcgaaggcgccaccgacnacgaaggcaaaggccaaccagcgcacagagacgacncncacgggcccgacacccgcgacagagacgaacaacggcgcacggagccgaactgttttttttttctcaccgnacggcgaaagaggccgagtttgtttcaacggcgggaaggcttcaaaggggagagaatggacggtgataaacccatcttcagcgtgaggagagcgtcgatcataggacggtcgcgtgcgagtttgacggtggagatgtacgacaacccaggtgaggaataccagatcgatgggggcttctcgcagcggttgctgccgggttccaatgtgacgaaggaatcggtgggtgagattcgtcgtaaa

SEQ ID NO: 14499 - DNA, 592 bp, Glycine max
  misc_feature (227)..(227): n is a, c, g, or t
  Coding DNA Sequence Number=SeqID_4720
gtggatatcgaatgcaccccgcagatcagtcgtgaccaggcgaggctagttgaggcggaagaccgggcgacacgtcatggtgcagtcgttaccatcgcacgcgcgtcggaggtatcgagctcaagccgtgatactacatgttactagatatagcgtctctcgtggctccgagtcgctgcgtgatcgatcgtgagacctgcttactcataatgcgtaggaagacggcnccgatctgcgcgcacgagacactcacggcgatgcgtcgtgaggcgtacgtgacgcgtggcgacagtcgcagaacactacgcgtagcgtggagcacagcattcagtgaatcgaactggcgagacgtcactctcatcctctgtggtagacgccgcgcggtcgaccggagctcgacacgtgcgacatacgcgcgcgtccgtcagtgtgagagcgatgagctgatctatctacgcatcgatgacacagatatctacatgaggagtgggcactcgtctacacaactcttcactatacacctctaccagtcggaccgtaggagagatcgacatcagcagttgccgcgcttccgcacagatgatgctcgcga

SEQ ID NO: 14500 - DNA, 579 bp, Glycine max
  misc_feature (320)..(320): n is a, c, g, or t
  Coding DNA Sequence Number=SeqID_4721
gtgaacacatgacgctctcctcatcactacgtgtgattctgggttggctatccgctcgcggcggtatcggcggagccacatgggtggtggctgcgtgtggtctcaccatacgaggcggcgtgtatataaatcagcgcgggggtgtttgtgtgaacgaacggcgatggtgtgtacgagtgtcacacgcgccctacgtggggtttagcacggcgccgacgcgcgcaccgaagacgcgggccggaggataccacgccgcgcccgcgcgtgcggactatagacaaacaaccagtcgcggcggccggggctcgcatacgtcggtnctggggcgcgtctcctcgaagatcgctctcaccaggtggcgtacgcgcgctcttctcttctgttgccgcctcgtggtctactgctggtggtgtgaaataatagtgtgctattcgtgctctagtagcacaaggcgcgcaagaatgaaagttgtatgatacagaggaacgatgagcaacacgagggtgagtgtgtgaccgagcaacagacgtctgtctggcaaaacatagatgaggagtgggaggctgtcgcacatactac

SEQ ID NO: 14501 - DNA, 308 bp, Glycine max
  Coding DNA Sequence Number=SeqID_4722
ggttgacagtgagagccaagccgctgaagcaaattatgtgacagctgtgacaacagagactacaaatgatcatggtgaagaacttataggaaccaccactagtccttatgagcaagctggttgtggttccaagactgattggcgtgtccgagcaatatcagccacaaagagatgccagcgggagaaccatatatatgtgaactctgaggatatagaggaaactggatacacggatataatgccagagagcagtgggaaatagtggatatgcataggagagctggtaacacgaatgagtgggcacatgt

SEQ ID NO: 14502 - DNA, 484 bp, Glycine max
  misc_feature (37)..(37): n is a, c, g, or t
  misc_feature (41)..(41): n is a, c, g, or t
  misc_feature (74)..(74): n is a, c, g, or t
  misc_feature (179)..(179): n is a, c, g, or t
  misc_feature (199)..(199): n is a, c, g, or t
  misc_feature (205)..(205): n is a, c, g, or t
  misc_feature (369)..(369): n is a, c, g, or t
  misc_feature (373)..(373): n is a, c, g, or t
  misc_feature (402)..(402): n is a, c, g, or t
  misc_feature (408)..(408): n is a, c, g, or t
  Coding DNA Sequence Number=SeqID_4723
ccgctcgacgcgtgaataacactgtacacacgagganaagnacagagacgatgagatgtaaacaaatttaaganaagcaggcgggacgatttagcatccagatgcctcatatatcgattgtccagataaacgatgcaccgcggcgcaatcacagagagggaggggcaagaacattaganggagtatgagttattgatcnttaatntcgtcttagctttcctgtgtatgatgaacgacgaagtgattattatctcttctgcatttcaactaatacagtagtcgtggatgcgagctctatacacacgctacgaccgtcacaaaatggtcataccacgatacaatactagtgcatatctactctatcatatncacngcttgtcctgctcctgtgtaattagttancgtcanagccatctcatccactcctacaatatacaatttatatatattcctatactagcatatggacgctatactccacgcg

SEQ ID NO: 14503 - DNA, 591 bp, Glycine max
  Coding DNA Sequence Number=SeqID_4724
agacttacagtcaattagcggcggagacagggctcaccaacgtctacgtggctcagctgctccgtcgccaagcccagctcaaacccgaaacagtccccaagctccgtgaagccttacctgctctgaccgaagaactcatcgccgccatgatgtctccgccgtggagatcgtatgatccaaacctcatccaagaacccaccgtctacaggttgaatgaagcagtgatgcatttcggtgagagtataaaggagatcatcaatgaagatttcggcgatggcatcatgtcggcaatagacttctattgctctgtggacaaagttaaaggagttgacggtaataaccgcgttgtcgtgacacttgatgggaagtatctttctcattccgaacagaggactgagaatatggtctcaaggctaaacctcaagggaagtacaagcgaatgatatgaaaatgtaagaataaaacgattcatatgaatgtaagcagcaatccatgaaggcttttatgtctaaagctgtaaacattgtaatatttatggtgtttgtttattctgtactctatgcaactccagcctcgagctgtttcaagttg

SEQ ID NO: 14504 - DNA, 527 bp, Glycine max
  misc_feature (118)..(120): n is a, c, g, or t
  misc_feature (233)..(233): n is a, c, g, or t
  misc_feature (249)..(249): n is a, c, g, or t
  misc_feature (290)..(290): n is a, c, g, or t
  misc_feature (413)..(413): n is a, c, g, or t
  Coding DNA Sequence Number=SeqID_4725
gtcatgccatctcctacactttatacggatccacccgaccatcatacaggagtcggtggaggaaggagcgtggtatagtggttccgctgcggtccgtcctacaccacgacgaagagannntgtgtctccccacctctccgctacgtggtgtcgtccatatactatctgctcatgaactctgttgtccgtgtactgacgcttggcgacttgcgcatccctcgccctcccaccgnagcgcccctcgtcgcnagcctctcacatgccgtcgtcgcgaggagtcgcgctacganctacccctctcctgcctcgtcctcgggcgcgtatgcggctctgcacgctgcgtcggcgcgcgcgtcgtgctcgtggtcgccgatgcgctccgctcgccaatcccctagcgcgtatctcctgantgctcggcgcgtctccctctctcggcgttccgactcgcgtttgcgtgctcgcaaactcgtgttcgtcgtgtgtgttcgctctggtgacgtatgatgtggcttgacagcacgtgt

SEQ ID NO: 14505 - DNA, 525 bp, Glycine max
  misc_feature (32)..(32): n is a, c, g, or t
  misc_feature (47)..(47): n is a, c, g, or t
  misc_feature (86)..(86): n is a, c, g, or t
  misc_feature (115)..(115): n is a, c, g, or t
  misc_feature (135)..(135): n is a, c, g, or t
  misc_feature (145)..(145): n is a, c, g, or t
  misc_feature (177)..(177): n is a, c, g, or t
  misc_feature (179)..(179): n is a, c, g, or t
  misc_feature (194)..(194): n is a, c, g, or t
  misc_feature (197)..(197): n is a, c, g, or t
  misc_feature (200)..(200): n is a, c, g, or t
  misc_feature (210)..(210): n is a, c, g, or t
  misc_feature (221)..(221): n is a, c, g, or t
  misc_feature (231)..(231): n is a, c, g, or t
  misc_feature (234)..(234): n is a, c, g, or t
  misc_feature (260)..(260): n is a, c, g, or t
  misc_feature (293)..(293): n is a, c, g, or t
  misc_feature (303)..(303): n is a, c, g, or t
  misc_feature (311)..(311): n is a, c, g, or t
  misc_feature (317)..(318): n is a, c, g, or t
  misc_feature (326)..(326): n is a, c, g, or t
  misc_feature (394)..(394): n is a, c, g, or t
  misc_feature (404)..(404): n is a, c, g, or t
  misc_feature (480)..(480): n is a, c, g, or t
  misc_feature (495)..(495): n is a, c, g, or t
  Coding DNA Sequence Number=SeqID_4726
acgagacgcgattgaggtactggacgatgcgntagcgggactgtacnatcgcgcgatcgtagatgatccactcgtgatcagctacntagtgatgatgacgcatcgagatgaaatnatgcgtataagtacgatgtnactgcagcgntggagcgcagccgcccgacacaaggtcggcgncngaccagtaacgttgngangtntctatagatngatacagtganacacgccgcnccngagacgactgatgggcatcaccagcntgcttgctacgcgcatcgccatacgcgactgantagatgagtncgcatacncgtcgnngttgatantgctagtagagaccggcggcgatgcgatgctgaatgatagctgcagacggagatgacgtgcatactantgagataacnatgcgagtgtcagagaacgctcgtgcgtctggtaagtagcactcgtcagcggaccacgtcgtactgtagtagtagnactgcacagtatgangtgcgcatggacgctgcttagtataatagt

SEQ ID NO: 14506 - DNA, 552 bp, Glycine max
  misc_feature (297)..(297): n is a, c, g, or t
  misc_feature (367)..(367): n is a, c, g, or t
  misc_feature (499)..(499): n is a, c, g, or t
  Coding DNA Sequence Number=SeqID_4727
ttatgcaacgtcagtcatccttgtgcctcgatgctactattacgccatcatatcatatgatatgcgtcggtatactaacatccgcattcgtactgcatcgctagtcgattcattcgtctctacgttctatctgcttcatctattagtggtctcctgtctcgtgttgcgtcttactgcctccgtacatgtcacgtgtgtaatactatcgttgtgtcacactatcgtgtgtgggctgttgccactgcgactttctgctcatcggatctctcatgcacgtatctcggccatgactgtgtnctatcatacttcttcataaggtcacgctatagatgatgatgcactataacagttatctgcgatgcgatgntgcatgatcatcttctctatgttcagcgactgctcatctacgtgcgtatggtgtgtgcgtgtagtgtaatgagtgatatcttctgtggttctgtgaggatgttctactcaatactatcactctaccactctntgctctgttttctcatctcactctctcccactctacgtgtttgttcgcctgtt

SEQ ID NO: 14507 - DNA, 531 bp, Glycine max
  misc_feature (205)..(205): n is a, c, g, or t
  misc_feature (458)..(458): n is a, c, g, or t
  misc_feature (463)..(463): n is a, c, g, or t
  misc_feature (466)..(466): n is a, c, g, or t
  Coding DNA Sequence Number=SeqID_4728
tatccagatacaacaccaggcgtgatgagcgggacgaatatgcgagagacggacaacgtaggcagatgagatatagcccacgcgagcacactagagcagtggttctctcctctcccagacacctgatctatcatccaatacaattattcgtagaacaatatcatagcctacatgtgacggcgttctttgtgtagcagagcgcgcnccaagccaatcgctgaactagcagggagagttcactgcgacagtgtttatagcgtagtctgagctatgcgtgtagttattattgttattatttaaaggtcgctatatatatgcctccactctagtttctttgtgctgtgtcgatctagtgacatatccatgtctcacttctatctagttatcaactaaggaaagagcttgatccagatgtacgtgtggttggcagatgttcggtggtcatagcgttggcacancgcancantgtacccccagtagtatttgcagttgttgtacttcttcattattctctgtgttgagtgctctaac

SEQ ID NO: 14508 - DNA, 565 bp, Glycine max
  Coding DNA Sequence Number=SeqID_4729
ggaactgatttcatcgatcctgctccgtcttaactcgattcagatactggagaaagctcagaaagtgtgcagatcttggcgccgcgtctgtaaagacccctcgatgtggaggaagattgacatggacaacgacggagacttgggaagcatggggtacgacccagagatcatgtgtcgtcacgcagttgatcgtagccaaggcggcttgcttgagatcgacttgtggtactttggtactgatgagctactcaattacatagctgacaggtcaagtaacctgaaaagccttagactcataatgtgctacccaatagctgacgagggattcgtcgaagaacctgttaacgaaacctgcccgcttgccttgaataacctccaagggtcacataaccgccgcaatgtctcggagacagctctcgaatactggcacggaaagcccctgcccccaattctgaataaacttgaaggctaaacctcccgaacaccaaccccccattttaacggccaactaacttcactgcaccccaaacccctaccgctttcgctgaaagcatgccctgaacta

SEQ ID NO: 14509 - DNA, 432 bp, Glycine max
  Coding DNA Sequence Number=SeqID_4730
gacgggaggtcatcggcgctatccagagagtctacagcgtcaggtcatattagctattgataggcgagtgtcatagtaagcgtggtagagataagagagttcttgcttccgtgatccgatggtggtatgcgttcattctcgcgtttaagtgacaatagtctgtgctgatcatcattatgtcgtcgatgtgtgtcagaagtttcgagtgttggacgtgcggaactagatgatgcttgtgagtgtaagcgcaatgacgtacgtaggatggcggagctcgcattcttagtagatgcagagatgacgatggtggatcagattggacatggcgttcatactactctacattctattcacattttattacataatattaccatgtatatatagtggcgacgggagaccgcagactaagctctgaggtggatggtatat

SEQ ID NO: 14510 - DNA, 400 bp, Glycine max
  misc_feature (266)..(266): n is a, c, g, or t
  misc_feature (307)..(307): n is a, c, g, or t
  misc_feature (331)..(331): n is a, c, g, or t
  Coding DNA Sequence Number=SeqID_4731
tcttcactttccaccgttggctttctctcgcgttttccaattcccccccaaatctcacgcctagggtttctatcgcaaaccctccctccctccaaccaggtcgcgtgcaaagggatttcgaagcttcggaagaaaaaaatgaaacctgttttctgtggaaacctggatttcgacgcgcgtcaatctgacgtggagaggctcttcagaagatacggcaaagttggatagagttgacatggaaaatccggggtttgcttttgtctaantgggaagatgaacgtggatgctgagtatgcaatcagaaagnttgatagaacagaattttgggtanaaagggtccggcccggatttcgtggtgagtgggactaaagcaaggaacgtggacagtagaagaatcagg

SEQ ID NO: 14511 - DNA, 358 bp, Glycine max
  Coding DNA Sequence Number=SeqID_4732
gactatctcactgggataacttaccaactatgaaatggatttataagcttttatgcatgactggctgccgatggaccgattcgcttccggaggacggcatcaggctatatactaattgccttgctcctatatcagatcgagggggagcttcacacgtactacctatgtaactcaatgggctactcatggatcggatacaccttatacctaaggctgcatcttactatccgatgcaatccccactcgtgctaataggtgaggacactctctgttgttactgcagagaactgatgcacatgctgattatacccagctacgtgaattaggtgggaaaaggacttgaactgctctccaatgc

SEQ ID NO: 14512 - DNA, 521 bp, Glycine max
  Coding DNA Sequence Number=SeqID_4733
ccaatggaataatgtgtcctcaccataacaccaggttattttaatttcatttttttattatatgttaatttcattttattggacagagcatgtaacccctgaatgttcctttaaaataaactagttttataaactctacaaactaaactatgcttatctttagtgaagagaaaagaaaaatgttatgcacgatgtgatacaattacaaataattatatattataaatttttgtctcttataaaatcacaaattcaaagttgaatgttggatttaaaaaaaataagataaaaaaagttaaataactgaataaaaatacaattttatccttacaattctcttcatgcaagtctgacttctttccacaaatttatgatttatgggggtaaaaatatgaaagtatcattttcataactgtaacaaggaaacaactatgcttaatgggacctacataccccaacttaactctgtcctcaatgtcatgtaccaaacgaagatgtctcgtttctgtcgtcagtaaatt

SEQ ID NO: 14513 - DNA, 597 bp, Glycine max
  misc_feature (136)..(136): n is a, c, g, or t
  misc_feature (317)..(317): n is a, c, g, or t
  misc_feature (397)..(397): n is a, c, g, or t
  misc_feature (441)..(441): n is a, c, g, or t
  Coding DNA Sequence Number=SeqID_4734
gacgacactagtctggtctccagagatggtgcggccgcgcccgtatgtattcctatttttatcatagtagtcgatcggcagactcctccactcgcgtcgtctctatcgccacgccacgcatttcgatgtatagaangtactgaaagagtgaactgattctgatggagtcgtggcgtgattaacactcgcgcatgtgtatgatataacttttctgcttctatgcgccgcctgccccatactactacttatatctattatgcgtgcgatgatataagatgcgacgacagtcctctctcgcgtcgatatactctctagtncgatatataataatatcagacgaatgtatcgccgcgaaacgactcacactgcaccggatgtgtattattataatgtatantgtgagcgtaatactcatctcgagctctcgctcgagcgttgagntacgcgactgacactctatcatctctatatcgtagagaccaccgcatgacgcgagcacgttgtatttatgaacatagtggtgcgcgcatcagcgctgtctctacacgagtgtgcaggcgtggttacacggcgcgagagcttcggtctgtatatcac

SEQ ID NO: 14514 - DNA, 444 bp, Glycine max
  misc_feature (368)..(368): n is a, c, g, or t
  misc_feature (412)..(412): n is a, c, g, or t
  Coding DNA Sequence Number=SeqID_4735
tgcggcgtcgccgagaggttcttacttctccttcctgctgattcacctatttttcaagcattagacgggcctggccgtcagtatggggaagttgaatctttttctcatgacatcaaagaggaagaattcgaaagtaaccccatgggaaattgttctaacgatcaacatgaacagcctgtggaaaacgtagggatcaacaccttggcagttcggcaattgcacaccgacatggatgatgaccacctgcacaatctgaaaaaagaaagagcaacagattcctctgttgaagagcatcgtattgctgtaaccaagaatattccaccagaagtcatctatacaatgcgaggggttcgatgccaaatctgttnttatgcgtgtaagggattcgattgtgtcgccaaactcattgctnacacgcaggaatgccatccagggaaggcctca

SEQ ID NO: 14515 - DNA, 428 bp, Glycine max
  Coding DNA Sequence Number=SeqID_4736
acggtctcctactttctcggcgccttcggagccccgaccctccgccatggccacggccgccaccatctccgccacgcccctcgcccccctcccctcctcccggcatgccttcgccagccccaaaatgctgcgctcgctccccttcctccggcgccgcctgccctccctggcggccgccgcggtcaagcaggacgcggcggtctggaacgcggcccccgtcgcctccatcggcgcggccagcgccgacggctcgctcttccacctgcgcgtagacctctccgacgccgccgacctcgcgtcctccttcaccgcgccggggcagtacctcctggtccgcgtccccggggaggacgacctcaagccggccttcatggccatcgcgtcgccgccggggggaggcgccttcgagttcctcgtcaaggccgtgc

SEQ ID NO: 14516 - DNA, 461 bp, Glycine max
  Coding DNA Sequence Number=SeqID_4737
aagcttttagcattttcgaatcatcaaaaaaagctttcccttctctctaacacaaatggcgatctcaaaggcttccgtcgttgctctcgtcgcggtgattatctccgtcgtagctaccgtcgcttccgctcaggtcgaggctccagctccgagtcctacgtccggatctgctgctttctcgccgtcgatcgtttcagctggtgttgcagccgtcgcagctcttgttttcggctctgctcttcggatctaagtctttgcgatagagattcgtatttttgaaaaaaaataattgatcgggtatagcagtattattcatggtattcgtgtgtattccggagcgatagatctctttctatttttctattatctaataccttcatatctgtatgagggtactatatttatatctagagtattgtggttttgtgtgtttcttctagactctatggtttttgatatga

SEQ ID NO: 14517 - DNA, 534 bp, Glycine max
  Coding DNA Sequence Number=SeqID_4738
attcaacagctcctgaaaatgttcaaaattccctctcttgatatggttctcaatgatgaactttcaagatctacagtctgtatttggtgccattatttttgcaaagaattcgacttgcgcaaaatttaacaaaatatgcatgtaacacctgctgttccatttgagttaatgagattgctcaatgtctatcatgatcttttgcagaggtgtatgaaacagctctgccctgaatgcatatcagttcttgatgaccctgttatgtgcctactgtgtggtaaatggtgctctccatgtaggatattatgctacgaggaaagtggatgccaaactcatgctgtgacctcgcgagctggtactggactgctatttgtgattaagagaacatcagtactactacagagatctgcatgataggagcatttgccatatgcttacttatatgctcaatgataggatgatttttgaatacagcgatgctagccgctttatttggatgaaggacatcttaggatctcagacttaattggcgttcat

SEQ ID NO: 14518 - DNA, 408 bp, Glycine max
  misc_feature (275)..(275): n is a, c, g, or t
  Coding DNA Sequence Number=SeqID_4739
tagtttcactcttggctgccagagatctagacgatgttaagaaaatgaggaattttttatactatgtacagtcacttctcgcatgtgtgcacacccagaactctattatatccgggatgctatctaatgttagatgcatcacagatatgtctcttaatactagaggctatgccttccatcttatgctacgagaagctatcttgatgctctaatacttagttaagctgaatctgatcagcggccggtggctgatcattcataaggcattttcaagnctctatgacctccgatgcggttactgtgcttatgccatacatgccctgtcctctactattatcagtgtagagatgatagcttacctgctatgtggtgggggagggggcccactacacaactcactaagcttga

SEQ ID NO: 14519 - DNA, 266 bp, Glycine max
  misc_feature (161)..(161): n is a, c, g, or t
  misc_feature (198)..(198): n is a, c, g, or t
  misc_feature (211)..(211): n is a, c, g, or t
  misc_feature (220)..(220): n is a, c, g, or t
  misc_feature (222)..(222): n is a, c, g, or t
  misc_feature (231)..(231): n is a, c, g, or t
  misc_feature (235)..(235): n is a, c, g, or t
  Coding DNA Sequence Number=SeqID_4740
ccccggttgctaatggtgctattgtacctgctgctcgagcgacaccaccaactgtccccatggactactcctgggctcgggaacttggactcattcgtaaaccagcttcattcatgactagtatttgtgatgaaagaggacaagaacttctgtatgccggnatgcccatcagtgatgttttgaagcagaacatgggtntcggtggtgtggnctccttgtngnggttccagngtancttgcctccatatgtctgcaagttctttgag

SEQ ID NO: 14520 - DNA, 551 bp, Glycine max
  Coding DNA Sequence Number=SeqID_4741
aggatgagaatacccgcttttccggcggaaatcactgcaaaccgactattttaaactatcggacaaccaacccccagcaggtcaatcagcaccacatgacaccgaggtgaactttctttctttcaatccatctgacgactggttattgccttcaacctcctgacattcaaagagtggcctctgcgatacacgccagctggccccaccgctacatgtttcaactagccacacagatgaagctgtacataacgagagctatcctaatcatgagaatgtgccactatcttctggtgctgacagacggctgatgggtacgtgaccttaacagagcatgtgcgacccagcagacatcaggagatggggaaggtggcccccctgaactactcttctctcatggaggtcacaaatggaaaatatcagatcgttcatggaacagaaatcagccatgggttatcacaagcgtagctgaggacaattcattccatgtctggcacatggcagacagcatctaccatgatggagatgatgacaacatgtcgactggcaatgat

SEQ ID NO: 14521 - DNA, 122 bp, Glycine max
  Coding DNA Sequence Number=SeqID_4742
gaagttctgaagtatatttgctcatgtgctcttcatctctcctgagaaggttgccttctgcagtgagagatcaatgaaagtctttactcggacaggccagtacatagggatccgttataagg

SEQ ID NO: 14522 - DNA, 268 bp, Glycine max
  Coding DNA Sequence Number=SeqID_4743
gatgggtgcttgatgattgaacttagatcagatcccagatgatgcttttgatgtttatcaaggtcaccatggtgacaagagtgtatatgtagcggattatattttgccaccaaccgcattcagtgagaaggaaggaacctatgcaaataccgacagatgcgcgcgacaaacattaactgcggatccaacaggtggttactcgctacatgataggaagataattctatctctttatgcagcttcagggagtcctgtgtcctatgatact

SEQ ID NO: 14523 - DNA, 291 bp, Glycine max
  misc_feature (124)..(125): n is a, c, g, or t
  misc_feature (127)..(127): n is a, c, g, or t
  Coding DNA Sequence Number=SeqID_4744
tgggcctttacacgcggtcaaaaattttccccttgaattaaattggggatttgggaaagccattcaacggcaatgggttttcccgaagccaaaggacctgctttcatttctttcaatctcgctnncnacagcaatcaaaatggattcatggtagcgttgattgcccaccgggacaaactaaacattatgaccacctgcgtgcgagagagattgctctgaccaccgcgagcaaggggttgcaagcggaaccagcgtcgagcgagagtgggagagctagggtcgcgggcaaga

SEQ ID NO: 14524 - DNA, 508 bp, Glycine max
  Coding DNA Sequence Number=SeqID_4745
tattatcccacaagatcccatgttatataaaggaacaatcagggaaaatttggatttattgaagcagtatagtgatgaagagttatggcagagtcttgagagagtctgtatgaaggagaaatttgaacaggaaagtggactggatactgaaataaaggaaggaggagagaatctaagtgcaggagaaaagcagttattgtgtataagcagagcgatattagcaaaagtaaagattatattgattgatgaagcaacatcaaatatcgatccgaaaactgagcaaacaatcttggatactatccacaatagttttgaagactgtactgtgatcactgttgctcatagactcaagactattatcaattctgataggatattgatgatgggagatggaaatattttggaatttgatagcccacagacattgattgatgatgataagagtcatttccataaattatggatggagcatgaacatggaagtaaaggcaacttttaatgtctgcta

SEQ ID NO: 14525 - DNA, 489 bp, Glycine max
  misc_feature (35)..(35): n is a, c, g, or t
  misc_feature (60)..(60): n is a, c, g, or t
  misc_feature (212)..(212): n is a, c, g, or t
  misc_feature (345)..(345): n is a, c, g, or t
  Coding DNA Sequence Number=SeqID_4746
acccgaccacgagcagtagtgttattatattaatnataacctacaatctcgattcaatanaaaacaacacccatactcttcacatacagtcccaggcaccgctatgtgtcgtgttcgtggtagtgcaacgaatatactcgccaacgcaacacacacgacaggatcgtccatatatattgtgtgtgtgttatggtgatgagtgatggatcganaccgcacacaaacacggcccggaccaatcacaaaacactatcattatcgccggctggtgatcgatgttagactgtatatcgtgtcgcgtggcgagtcacaggcccactccactaccctctctcatatcttgtnctaggtgtgatgtctgtgcatgaccaacgtcatattacatccatctcgcacaggcacgtgtggcgcgtggctggcctagttctgtgcaccgtgctattcgctagagcaatgagcaggcgtggtctatatgtgcacttccctcgt

SEQ ID NO: 14526 - DNA, 548 bp, Glycine max
  misc_feature (78)..(78): n is a, c, g, or t
  misc_feature (372)..(372): n is a, c, g, or t
  Coding DNA Sequence Number=SeqID_4747
acgagcgacgttatccagtgtgcagattacggtgtctgtactgtgtagccgcgcgcgacgtttatttcaatattcatngttgagcgcacgatatacgcaaatgtatacatcgagagcggcagaggatgatatgggagatcgcgctaccggctccgactatgaatgtttgtgtgatgtaggattgatgtggacgacgagatgagacatgtggtacccgatgtcgagaagtcagactgacgatgtaaattgagcagaaacaatatatcatataatcactgtagcaaattactgtcacaatatacaagctacaatctacagcactatgtgatgctagacaactcatagacgtaatatattgtcctattccatagncaacgatcacttcgccaagatcataagatctctatcactcacctcgatatagatgcagtctcacgtgcgactgtccaactcaacgatacgtatgatgctgcgttcggtgtagtgagactagttgccagctatatgtctgcgacagacgtgctgatggtacggcaccgtgtcactat

SEQ ID NO: 14527 - DNA, 458 bp, Glycine max
  Coding DNA Sequence Number=SeqID_4748
catgtatgtatagaccctccggtgatcggcgacgcgagccaatgcgtcagagagctatgtagtttccggatcagttcgacgccggaggtgtcttgggtgtcttcggcgggcgctcggcgaggccctgctcgacgtcgctgccgccgccgcgcgggctggaggaggacgcgcccaccacggcctgcttgcccctgctcaggagccggcgcagcgagcggagccggacggacatcggggaccgcaggtcgctcgccggcagcggcgtcgcgggggacgacgacgcccgcgcccaccgccatcgcccggtcggcgatgtcaatcaccaggctgtccttcctgccccccgaagccccccagctcgtggaggaatgccggatggcgggcccggggcctctgggcccccggccccccccgccacccccccttgttcccccatagtgggacacccttcccgcgag

SEQ ID NO: 14528 - DNA, 576 bp, Glycine max
  misc_feature (136)..(136): n is a, c, g, or t
  misc_feature (149)..(149): n is a, c, g, or t
  misc_feature (151)..(151): n is a, c, g, or t
  misc_feature (153)..(153): n is a, c, g, or t
  misc_feature (260)..(260): n is a, c, g, or t
  misc_feature (329)..(329): n is a, c, g, or t
  misc_feature (433)..(433): n is a, c, g, or t
  misc_feature (445)..(445): n is a, c, g, or t
  misc_feature (453)..(453): n is a, c, g, or t
  misc_feature (470)..(470): n is a, c, g, or t
  misc_feature (475)..(475): n is a, c, g, or t
  misc_feature (478)..(478): n is a, c, g, or t
  misc_feature (484)..(484): n is a, c, g, or t
  misc_feature (514)..(514): n is a, c, g, or t
  misc_feature (531)..(531): n is a, c, g, or t
  misc_feature (533)..(533): n is a, c, g, or t
  Coding DNA Sequence Number=SeqID_4749
cactcactgatctacatcctgatgagagtagtgatacgtcctgatagtgtgtgttcgatgctcgtcgactcctgcctctacctacgcagtccattagctcacgcgtgctctcggctctcaccgactacatcatctnctctctatcacgntncncgctgcatagtccgcactatcgtacacgatgtacgcacgacaacatatctctataccgtcacgactcgctgtcgatcgatctcagagtgcgtatcacagaatgtctncagaaccagccgcatagcgattggatagacagtgagatgagaatgatcgagctagaactagtcgctatnacagtatgtctatagatgttcagatatacgtagattgtagacatcgtaccgtcgcgcgaccaccgaacgtcgcggccggtcacgtaactgcatcgcgactatgngtccgacgttgntcagactnctgcaatacgcaatgangaagnatnatagcntaatgatcacgacatgacgcatacccgcantcgctgcgtcagtcggngnagcgcatcagtgcacgactgcgtaatctccacgactactaaat

SEQ ID NO: 14529 - DNA, 573 bp, Glycine max
  misc_feature (132)..(132): n is a, c, g, or t
  misc_feature (381)..(381): n is a, c, g, or t
  misc_feature (395)..(395): n is a, c, g, or t
  misc_feature (404)..(404): n is a, c, g, or t
  misc_feature (514)..(514): n is a, c, g, or t
  Coding DNA Sequence Number=SeqID_4750
gattgtccatgtgtcttttgtcagattgtctaatcgtgactatgtgtacggatgttctgcgtcggtaggtgaggggtaaggagagagtgaatactagagtgtagaggtatgcgctagtgatcactaacctangatcataaagagcagtatatgataggcgttggctttgctgtagcatatgagtattaagatgctccttatggtgaataatttagcttgcggagtagtggaagactgaatctagagtctgtagtactatgtatcgtgctagcgtttagttgcacaattgatcgttagtgtatgtatctaatattttcacgagatctacgcgatcatcctttcgagttagtttaagtttgccgatttagacatatatagtgnatcgagttcaaggngtgtatgtnttagacatatgctggttgctctccttgaagagatatagtagagtgcggagagggggggccattgattcgtgaattctcttattactgaacgctgtgggagtggggcggcngtcgcccccgcatacctccgagaagggtgctggtgagtagggacttgcaaccagtgaga

SEQ ID NO: 14530 - DNA, 513 bp, Glycine max
  Coding DNA Sequence Number=SeqID_4751
agacgcgaggctacagtgagagttatgatgattactgtctgatgctcccagaaatcgacggcagatatcccattatgatcaatctaagttattggggagaacgtgcagaaatagcaagatattgttctaagtctgtaagcaaagacacatcgcacataaggctccaagatcttgtaaggctcctccaaggtggcgcatcaagcaagagctcgacgggttcctatctgagattcagccaactgcatcgatcgaggtgaaaatggatctggtccgtgaccgggcgctttagggcggatcgatgctcgcctgtgggattcacacgcatgcaaatcccagctgtccgtggtaatgcagcagcagcagttttgttaataagccagatatattcaggctttctgtaaaacgttagagtatcattcacatgttatccaggtctttagcggcagaagcgtgatcagaggtctctcgtgctcgtatgagtcggagcctgtaaatgcaagaagcgcgcctgaa

SEQ ID NO: 14531 - DNA, 477 bp, Glycine max
  misc_feature (31)..(31): n is a, c, g, or t
  misc_feature (41)..(41): n is a, c, g, or t
  misc_feature (43)..(43): n is a, c, g, or t
  misc_feature (45)..(45): n is a, c, g, or t
  misc_feature (47)..(47): n is a, c, g, or t
  misc_feature (50)..(51): n is a, c, g, or t
  misc_feature (54)..(54): n is a, c, g, or t
  misc_feature (68)..(68): n is a, c, g, or t
  misc_feature (100)..(100): n is a, c, g, or t
  misc_feature (110)..(110): n is a, c, g, or t
  misc_feature (117)..(117): n is a, c, g, or t
  misc_feature (143)..(143): n is a, c, g, or t
  misc_feature (145)..(145): n is a, c, g, or t
  misc_feature (149)..(149): n is a, c, g, or t
  misc_feature (167)..(167): n is a, c, g, or t
  misc_feature (184)..(184): n is a, c, g, or t
  misc_feature (195)..(195): n is a, c, g, or t
  misc_feature (230)..(231): n is a, c, g, or t
  misc_feature (233)..(234): n is a, c, g, or t
  misc_feature (237)..(237): n is a, c, g, or t
  misc_feature (239)..(239): n is a, c, g, or t
  misc_feature (260)..(260): n is a, c, g, or t
  misc_feature (262)..(262): n is a, c, g, or t
  misc_feature (266)..(266): n is a, c, g, or t
  misc_feature (275)..(276): n is a, c, g, or t
  misc_feature (291)..(291): n is a, c, g, or t
  misc_feature (295)..(295): n is a, c, g, or t
  misc_feature (302)..(302): n is a, c, g, or t
  misc_feature (306)..(306): n is a, c, g, or t
  misc_feature (311)..(311): n is a, c, g, or t
  misc_feature (351)..(351): n is a, c, g, or t
  misc_feature (358)..(358): n is a, c, g, or t
  misc_feature (364)..(364): n is a, c, g, or t
  misc_feature (373)..(373): n is a, c, g, or t
  misc_feature (427)..(427): n is a, c, g, or t
  misc_feature (442)..(442): n is a, c, g, or t
  Coding DNA Sequence Number=SeqID_4752
tgtagtcggcatagcacgtcaccatactacngaccacaatncncntnatnnttngtgaccatgacttnaacgtatgatacgcagctcacccaagcacgtnctgcagtcancagcacngcattcgatcatgccgtaaggttcanantgantatgacgcgacgctagtncatcggtcgctagctgncacgtactttntagttgcttgtcagcaccaagacacagccagcaanncnnaanantcagagacagtgtccgtcatngntatngattgagtnnaagcgactgctgggntagntcacatnagantgtangatatactgcgtacgtatgtcatgacgtagtcatacagcntgtttgntatgtnatgtgcaantcgacatgttgattgcgcgtactgcgcgatattgacgtggcgagaccgcaacgnagagctacgtatgcntttactgatgtttcaggtagctagtcagtccgtac

SEQ ID NO: 14532 - DNA, 458 bp, Glycine max
  misc_feature (43)..(43): n is a, c, g, or t
  misc_feature (185)..(185): n is a, c, g, or t
  misc_feature (215)..(215): n is a, c, g, or t
  misc_feature (265)..(265): n is a, c, g, or t
  misc_feature (300)..(301): n is a, c, g, or t
  misc_feature (315)..(315): n is a, c, g, or t
  misc_feature (318)..(318): n is a, c, g, or t
  misc_feature (403)..(403): n is a, c, g, or t
  Coding DNA Sequence Number=SeqID_4753
tatcagagtgatagcgaaacaatacggagaagagaagaataangacatcacgtaaatgaaggattaatattaaggtagtgcgtcgttcatgttatactacgttttatgtcgatgcgtctgcgctcactactgtttacctatcacattatatctatatcatcattctcgtgtgttgtgcggcacangcagacaaacacaccacgaaacagtaaccncgagaacagcggagtagtaagatgagatggagcaccacgcacgcatcgcnccacgtcgctcgctgctcggcggtccagcgcccanngaccaccaggaganagnacaaagaataaaaaaaaagaagaaacagggacgcagtggttcgtctgtgcggtcgaagagaagaggaagagagagacaagacgcngctctccccgccccgccccccgcggggggtaccccacctgactttgctagggaga

SEQ ID NO: 14533 - DNA, 535 bp, Glycine max
  misc_feature (68)..(69): n is a, c, g, or t
  misc_feature (94)..(94): n is a, c, g, or t
  misc_feature (144)..(144): n is a, c, g, or t
  misc_feature (147)..(147): n is a, c, g, or t
  misc_feature (149)..(149): n is a, c, g, or t
  misc_feature (207)..(207): n is a, c, g, or t
  misc_feature (214)..(214): n is a, c, g, or t
  misc_feature (218)..(218): n is a, c, g, or t
  misc_feature (260)..(260): n is a, c, g, or t
  misc_feature (265)..(265): n is a, c, g, or t
  misc_feature (283)..(283): n is a, c, g, or t
  misc_feature (324)..(324): n is a, c, g, or t
  misc_feature (328)..(328): n is a, c, g, or t
  misc_feature (331)..(332): n is a, c, g, or t
  misc_feature (335)..(337): n is a, c, g, or t
  misc_feature (384)..(384): n is a, c, g, or t
  misc_feature (388)..(388): n is a, c, g, or t
  misc_feature (424)..(424): n is a, c, g, or t
  misc_feature (467)..(467): n is a, c, g, or t
  misc_feature (478)..(479): n is a, c, g, or t
  misc_feature (485)..(485): n is a, c, g, or t
  Coding DNA Sequence Number=SeqID_4754
acgtcgctggtgctgtacgccacactgctacgatttagtatcatgtatcataatcgctcatgtccctnnccgcggtcgccgtatcactgatgtnccggttcaactgatttactacgacgccgaatacctcgcgactatccaccnctntntcgcgctctcgatcgtcgcgagtctgcggttgcgtctgctgtgacggtggggagaccnaccgccnctcngtctccgctcgtgtgagcgctcggcatgagaggtggcgcttntgtgncactacatgcgtatttcnaaggaaatgaactacgctgacggtccgagcgtcagcgcagnacgncannccnnncatcacgtattacgactggagtgatcagcaatatcgctgtgtgtgtntcgncctactatcgtctgctatcgagatgatgtttacgcnattgatatgatactcctggtgcttgtgtgtgatctgcgctacntcattagattnntaattntctgtatggagcgacgacatgatatagtatacatcttatcagtgagctag

SEQ ID NO: 14534 - DNA, 211 bp, Glycine max
  misc_feature (33)..(33): n is a, c, g, or t
  misc_feature (46)..(55): n is a, c, g, or t
  misc_feature (62)..(62): n is a, c, g, or t
  misc_feature (64)..(69): n is a, c, g, or t
  misc_feature (72)..(72): n is a, c, g, or t
  misc_feature (109)..(109): n is a, c, g, or t
  misc_feature (111)..(111): n is a, c, g, or t
  misc_feature (124)..(130): n is a, c, g, or t
  misc_feature (132)..(136): n is a, c, g, or t
  misc_feature (138)..(142): n is a, c, g, or t
  misc_feature (144)..(144): n is a, c, g, or t
  misc_feature (161)..(162): n is a, c, g, or t
  misc_feature (171)..(171): n is a, c, g, or t
  misc_feature (175)..(175): n is a, c, g, or t
  misc_feature (177)..(177): n is a, c, g, or t
  misc_feature (180)..(181): n is a, c, g, or t
  Coding DNA Sequence Number=SeqID_4755
agcttccgaatttatcactctccccgcgatgcngccggtagcagcnnnnnnnnnntttttangnnnnnntantattgatgatgcatgactatagtagtcatcagtaggngnctctcaacttttnnnnnnncnnnnncnnnnncntcccccccgcgcgtgcnncgccgtgcntgcncnccnncgcgcccgcggcaaaaagattctacattat

SEQ ID NO: 14535 - DNA, 519 bp, Glycine max
  misc_feature (26)..(26): n is a, c, g, or t
  misc_feature (253)..(253): n is a, c, g, or t
  misc_feature (257)..(257): n is a, c, g, or t
  misc_feature (286)..(286): n is a, c, g, or t
  misc_feature (288)..(288): n is a, c, g, or t
  misc_feature (334)..(334): n is a, c, g, or t
  misc_feature (390)..(390): n is a, c, g, or t
  misc_feature (449)..(449): n is a, c, g, or t
  misc_feature (462)..(462): n is a, c, g, or t
  misc_feature (480)..(480): n is a, c, g, or t
  Coding DNA Sequence Number=SeqID_4756
acaccccacctgtgtgttatatcacnacacaccaggtagatgcactcctgacagtcatgatgcgactgtgtctcgcgcactgagttgcatatgtgtaggtgctatacacatgtgacgcgcactcatctattcggatgattgatactcgcatcatacccatgctcgaccgacactgaccactctcactatgccgacgcaacgtcgtcagtgacctgtgactgctcattatgttagtcgtctagtcggacacacntatnaccctcatacacgctcctgtgtgccgtcngngtactcatgtgcgtcatctccatgtcatgctgtgcgtgagcatctncgtctcgtgtcctgtgtgatgatgcctgtgcgcgcctgtctctcctcgctcgcacncacgcgacatcgacgagacatggcgagtaggatgtacgtagacactgcaggtggctcgnaggtctgacgtcntatgacacattatgaggngtgagtgcaccgaacgcatcgctacatcgttatacgtat

SEQ ID NO: 14536 - DNA, 569 bp, Glycine max
  misc_feature (73)..(73): n is a, c, g, or t
  misc_feature (86)..(86): n is a, c, g, or t
  misc_feature (143)..(143): n is a, c, g, or t
  misc_feature (168)..(168): n is a, c, g, or t
  misc_feature (218)..(218): n is a, c, g, or t
  misc_feature (448)..(448): n is a, c, g, or t
  misc_feature (497)..(497): n is a, c, g, or t
  Coding DNA Sequence Number=SeqID_4757
gcgcgccttcatattgcgacacatacgcgacacgtcgtgtgtgctcgctcgtcagtgcatactctatattagntgcgcgctacgtngtacatctgtacatcatattgcgatactctacacgtagcggtgtgtcatggtacgtngctcagtcgcgtatgtacatatgtncgactctccgcgccgagtatcgctgtatacgacaattcgtcgatgcggcntgcattgctacacggagactgtcgacgtggagtgagtctatctatcttgtgcgatctatacctaggaactcatcgtgcatagtacaaacatcgcttctactggatcgtctcgatactcgctctacatctgtatcactcatcgagtgacgcgcgtctgcacagggagtgtagatctcgcatacatcgtatcgctcaccatggccatacttctccactagtcgtcatcatcncagacacggcagtcttgtagcacacatcagtatacagaacgctacattntcagatacgctcactcacacatacggcagtcactagcgctgtcatctatacctctcacgatcatatctactt

SEQ ID NO: 14537 - DNA, 525 bp, Glycine max
  misc_feature (29)..(29): n is a, c, g, or t
  misc_feature (65)..(65): n is a, c, g, or t
  misc_feature (68)..(68): n is a, c, g, or t
  misc_feature (144)..(144): n is a, c, g, or t
  misc_feature (280)..(280): n is a, c, g, or t
  misc_feature (384)..(384): n is a, c, g, or t
  misc_feature (397)..(397): n is a, c, g, or t
  misc_feature (424)..(424): n is a, c, g, or t
  misc_feature (485)..(485): n is a, c, g, or t
  Coding DNA Sequence Number=SeqID_4758
gtacttgtcaactgcacgagtctatatcntgacgcacactcactactctcctcaccaactccacnacncacactcatacatccataacaatatatataccaacacgcgcactctactacgtctctcagaccatgtcgtaagtcnagcattacgccgcacacatcttgtagtgtatgtacataggtccgcatctcagttacgacatcggatgcgcattgtagtatgatatgaacttcatacgaatcgtgccgatgtctcttgtatagtcttacctacgacnctgtcatccgtagcgcatgttctcatgatatattatgtcggtgccgtgttgacatgcaactgtaggactggtagatatgtgtatgaggcgcaagtcgctccgcncgctatgtactantgctacactgccatgtgatgactcatnatatatagcagtcagtatatgtgctgtgtggtctatatcactatgtgaacgtgactgcgangtactgcactacgtatcacacatgtagatgatccctccct

SEQ ID NO: 14538 - DNA, 415 bp, Glycine max
  Coding DNA Sequence Number=SeqID_4759
aagcagccgtgacttgcaacaacgtggttggtgatctttacccttgcctctcctacgtgatgcaaggcggaaacgctccatcaactaactgctgcaacggtgtcagaacgctcaacagtcaggctcaaaccactgcggatcgtcagagtgtttgtcgttgcatcaaaaatgctattggaggagcctcttactcttcaagcaaccttaacaatgctctgtctttgcctgctaagtgtggtgttaatctccctttcagtatcagcccttccaccaactgcaacagtatccactgaaataagcagaagatcctgaaggaagctactactactactacactactacaagaacttaggacatggcctggtagtagtaactacgttgttcagtgatgtatcttcatctctatgttcttcaa

SEQ ID NO: 14539 - DNA, 551 bp, Glycine max
  Coding DNA Sequence Number=SeqID_4760
atcccctagtcccagctaacggagtggcagaatacaagctaacacaaatgggaaaacacgaatgacaatcattcaatcatatatgcttttacagaaggtgtggtgtcttggagtagcattggagggggtccttttttgtatcttatttttttaattttaaaaaggttctcgaatgagatatacttgtctatttagtatgattggctttcattttctttctcttgttttcgttaattaattcatatttattttgctaccatgataaacccctacttttgtttaagtctcagcctctgaatagcgatgttatgccattatgtgtatggtgagggactgagaatgatcaaattgttttttaaaatacattctcttttatattgcataaaaaaaaaagtgacagagacgttcggcatcaagattgagagttgatttcctgaattcaagctcactcaacttggtgttaggcaatggcccaaatggggttgtcctccaagcaaattcccgtggacatatgaatctaaagagacctgctatctcttgggaggaaaaag

SEQ ID NO: 14540 - DNA, 453 bp, Glycine max
  Coding DNA Sequence Number=SeqID_4761
aagctgaacctgtaaatagacccaatcctttcactaaacctacctctggtccaagtggagattatcctgtgtctaacttgagagaaccagttcaacaacaagctcaaccttatgtcttttatcaacctaaatatactcaagctcctgtctttgaaaaagagcaagattatagcgatttccatgatgaacgtgtgaatcaaactgagcaaaatcttcttcataatgatcaaaatttgcttaataataatcaaaataatcaagacttgatgaataatgatgcctatcaagcagaagaagacactggaagaaagaatatctatccaagattggatacattaaatgcaggaacttatccttcatataacccttatagagttgacgctaagccaactgatgatgcttttgctcgtattcgtggtgaaagaactgaacatcacgaatatagccattctg

SEQ ID NO: 14541 - DNA, 531 bp, Glycine max
  Coding DNA Sequence Number=SeqID_4762
cactgccgccgagaaaagacctttttcagtgttggaaacatttaaaatacgaactctaacgcctacaaaagtcgtgtcggacactgctcactgagacctgtaatatcaacttgggcacttagccaacaccaaaatttggcttgacacttaataggacacaactcattcaaaaaattgatttcttgaaattcaatttatgaaaaagatttaaaatacaaaatgatcatcatattaataatttttttgaaaatacacttggcttttgatgtttaaagacaacttacaggaatggttcaaataccaatataaatttgtttaacctgtgatgttgctaatctatatttcatttgacttactctactcgtgtccatgttacatagcctaaaaaaccaattatacaactaaactaggcaacttaccttatatatttgtatcctatttccagtacaccaagtactgagttatatataataatatctgatttttgctgtgcaaaaaaaaaaaaaaacaggaatctaacagcttgtatga

SEQ ID NO: 14542 - DNA, 345 bp, Glycine max
  Coding DNA Sequence Number=SeqID_4763
taaagtcgactatttctcccctaagaacaagatccggcagagaaagttcttggtggcaaagaagaagaaagagaaaaaggcagaagaagagggttcaggtgctgctgctgactcttgcaagtgcaaagcaagtggtgcaaatgcaaacgagaacaacaagtgtgtgtgtgtggcttacaacaacctaaggaagtcccaggaagagtttttcaagaacaatgatgatggtgttgttgatgatggtgaagaagagggttttgagagtgtggttgttgaagaagaaaaaggagaatcgttattggggaatggtgaagtgagtggtttggttgtgaagcgtaagaggga

SEQ ID NO: 14543 - DNA, 426 bp, Glycine max
  Coding DNA Sequence Number=SeqID_4764
attccagaaagtttgacacatgtccacaactacactaagctgctcttctcccgggagtcatttgagaaaacaaagcctccaaaggtagaatatgttattagtggatgggcgcctaaggtgaatgcttgaagtaattctaaattatgagatatctgaacatcagatatgtaatgtactgtgactgaaccttgttaagaataggatggcgaactcatgatgtttttcaagagtattgttccccttttaataataaacatgtagtttgttggtgtgtttcctaaaaaaaaaagcgtgcaatcaaagtgatgaggggcttaattgagtaatctgtgtagcaaggattgaaacgattgaattttgcgtgcaggtgcttgacaccagaaatttgtggctgtactcttagacacccatcatttattttacttt

SEQ ID NO: 14544 - DNA, 599 bp, Glycine max
  misc_feature (239)..(239): n is a, c, g, or t
  Coding DNA Sequence Number=SeqID_4765
ccggagttatattagttctcggtagagtacggagagtggccagaaggattcctcggtagtttaaatttacttacatcctcaacgaacatattaataacggtacgagaagtcgagagatagctacatagcagtttttgatagaagataaaaatgaaatttgagttggataaaaatttcagctatgcgttaacacatgctgagttgggtggtgggtgatgcatcatgtgttaagaggtttnttggtgcggctgcggggtcgacaatccctcgttttcgttcaatatgccgcttcctatcttattccctcgccgccccgagaggtctaccctactccccctcctcccgcccgccgcgccgcacatgcgccccgcgcggcgtccgtgtgttgtttttagttattgaaggatagagtgatgtcgttcgccgatggttgctttcatacatgtagaggatcagaagacggccttcgccccctccatcatcacaatatgtataagagattcttctgtctgtcccgtagcaatgcacttcttttacgacgcttctctcctcccgcgggggagtggcaactttaggaaagagggcgcaaacaccatttt

SEQ ID NO: 14545 - DNA, 518 bp, Glycine max
  misc_feature (475)..(475): n is a, c, g, or t
  Coding DNA Sequence Number=SeqID_4766
gaggacattgaaggcggcgaacttttccgggttcacgccctggataccaaggatctggatcgctgcgcgtgagaagccacactgcggtgtttcgggggttcccttcatgaagaggacgacgggagccgaggcgacggccttgtcgatggctgagcgggtctggtcagacaacagacgtgcttgctggagaagagctggagctcggatcggttggatgggagtccgagcggcagggcgcgcaacctgccgaagcagggtctgtgaagtcgcacgttagcgaagaataatgcttataggataagaggggcttcacgtaccgatgtgaacgatcttgagagcattttggtggtggttgtgtcttgctaagctcacgggagatctggaccggggtcggcaaacactttctgtcgtgatgcaatcgaatcacgtgcagccttttactcatccaagggaccgtgcccaaccaccacacctnacatattgcacgccacaggatggcacatcatccagacttgctg

SEQ ID NO: 14546 - DNA, 590 bp, Glycine max
  misc_feature (46)..(46): n is a, c, g, or t
  misc_feature (183)..(183): n is a, c, g, or t
  misc_feature (413)..(413): n is a, c, g, or t
  misc_feature (420)..(421): n is a, c, g, or t
  misc_feature (516)..(516): n is a, c, g, or t
  misc_feature (545)..(545): n is a, c, g, or t
  misc_feature (565)..(565): n is a, c, g, or t
  Coding DNA Sequence Number=SeqID_4767
tgttgctcttgtgtctatgttacaacatctgcccacccacctcttncttgtttgtgtgttcttggttgcgtccgcaacctcgcaccacgttagcgcttcatcgtatagcgtagagcattgcgcgtgcatgtagaagtgtttgtatcgtatattacgtgtccatcagcaccgcttacacatctntatatcatacgtttgttcacgctcacttgacacttcctcttatcagtattgtcccctcttattcttcgtgcttcacacacccaccactatctcgccctctctcttctcaccacttacatctcttcacccatgcatctctcttcctcctcacatacctgtactttatttctggtatatgcgcacatccacactgtctcgcggtccactcgactctatctcgccacgcacanacacggnngactgtcgagcacacataccgcgacggctgcgtcctacacatctactcctaggctcgactaagctcactgtccgtcacgcacacacgctacacgnctgcgtgtagccgcggaatccactcgatntccgtctctcgctcacatcnttcttaccgtagctgtgcatcgacc

SEQ ID NO: 14547 - DNA, 567 bp, Glycine max
  misc_feature (47)..(47): n is a, c, g, or t
  misc_feature (59)..(59): n is a, c, g, or t
  misc_feature (224)..(224): n is a, c, g, or t
  Coding DNA Sequence Number=SeqID_4768
atgatgcgcgctataatgtgtaaaattataccacagcacataacccntcaaccacccancacaccacgacagcatgacgaagacacaacaacctagataaagtataaaatacatgcatacacctaacagtcgacacaagaacgcacaacgctaacaacagaatacaagactagcatacaaacgcgagcaccgcacgggtataatatacacgtgatctctcatcncgcctcttcctaatcgagctctttagtggttgctgtatgcattatatgtcgtgggtatctcattgatatccatcttttatcgcggtccgtgtggacaatggatactaatagcaatatttctttgatgatacgttgagactgcaatcctctcaccgtgtggcgcgcgccacctcgactcgcgcgcgaggaagctagcggacagtacaatgacgcttcgcatagatgtgatagctccacaccggactatcgagtgagtaagcgatatcaatatatgtgtgtggtgcgcaataaatgccgctaatacacggaagaaggaatgatgttggagacttacacacaccac

SEQ ID NO: 14548 - DNA, 553 bp, Glycine max
  misc_feature (185)..(185): n is a, c, g, or t
  misc_feature (187)..(187): n is a, c, g, or t
  misc_feature (236)..(236): n is a, c, g, or t
  misc_feature (257)..(257): n is a, c, g, or t
  misc_feature (313)..(313): n is a, c, g, or t
  misc_feature (319)..(319): n is a, c, g, or t
  misc_feature (371)..(371): n is a, c, g, or t
  misc_feature (388)..(388): n is a, c, g, or t
  misc_feature (392)..(392): n is a, c, g, or t
  misc_feature (403)..(403): n is a, c, g, or t
  misc_feature (429)..(429): n is a, c, g, or t
  misc_feature (431)..(431): n is a, c, g, or t
  misc_feature (437)..(437): n is a, c, g, or t
  misc_feature (448)..(448): n is a, c, g, or t
  misc_feature (461)..(461): n is a, c, g, or t
  misc_feature (483)..(483): n is a, c, g, or t
  Coding DNA Sequence Number=SeqID_4769
ctctgtcatatgtaaattgtgcggctataagcagggtattagcgctgcgtatgtatagatatgagtcagagtgcaggaggtgcaagatgacgtagagtgtgtgtctcactgatgtaattcacgagatgagggtctgtagcagatgtgtcgtttgtgtcgtggtgtgttataatcggacgagaganangatatgatgacgactggttgctgatgttcgttgtcagagtagctagatntggttagtagctttgcgtatnggtggctctgcgattgttggtcgtctatgagtagtctgatagatgagatagagcangtatantttactggccgatatagtcacggtgagtatagagagagtatcagatttgcgngcagaactcgtctcacntgtngtgttcgcgangaagtacacacagacagagagtatangnagagangaggccgtgtnagtgtcagtattnatctccgttgctgtatctctgntcgaatgggcggcggagagcacgctcctgagtactcacacgatgatagtgcggatagtatgtcgtgtgct

SEQ ID NO: 14549 - DNA, 577 bp, Glycine max
  misc_feature (98)..(98): n is a, c, g, or t
  misc_feature (110)..(110): n is a, c, g, or t
  misc_feature (189)..(189): n is a, c, g, or t
  misc_feature (210)..(210): n is a, c, g, or t
  misc_feature (252)..(252): n is a, c, g, or t
  misc_feature (296)..(296): n is a, c, g, or t
  misc_feature (340)..(340): n is a, c, g, or t
  misc_feature (446)..(446): n is a, c, g, or t
  Coding DNA Sequence Number=SeqID_4770
gcagagagggcacacgtacgtatacttatcaagcctctaatctcaattctaccgttaagcgcatattacaacatatagaatgtagttcgatggcctcnatacaacttctngttattagcacagcctatggacgacctcatatctacatcccagtgtcgagatatgtgactgtctcttgcatacgagcgngcgagagctgagtagttagtnggagaatcacgagcgtcgcatcggaacagcccgcaagacacngtaacgtaagagagccacatcaaatttattagaaaactactaanatattactagactagaagaatgaacgcctatgcagcgcgcatgnatcgcagtccttaccaccactgctccgcttctccgactacacaccaaactccacgataatgatgcagcggagagatacctacaagaacacgacactcacgccacanaatacaagaaacagagagagggcattgattctcgcttacccctgcgcgacctctccgaagggtgtgtggacctctcgttcccacctaatttatgggaagagaaagatatcagagctctagcaacgtgcgga

SEQ ID NO: 14550 - DNA, 522 bp, Glycine max
  Coding DNA Sequence Number=SeqID_4771
gtccagcagaggtcaaggtggtatccagcagttgcttgctgctgaacaggaagctcaacacattgtcaatgctgccaggaccgcaaagatggcaaggctgaagcaggccaaggaggaggctgagaaggagattgctgaatacaaagctaaaacagagcaagacttccagaggaaacttgaggagacaagtggagactcgggtgcgaatgtgaagaggctggagcaggagactgatgccaaaatcgaacagctgaagaacgaagcttccaggatctccaatgatgttgtggagatgctcctcaaacatgtcaccactgtcaagaactgagagagattcgattccattcctctgtaataatcaaaagccatttatgagtttatttctttctttatctcatttcacgcgtgtggtgttgttactggattgaatctcagagactcaaatctcatatgaaatgtgtttcttgtaatttattcttctttttcttcttgtttgttgtattcatcatttccttttgagga

SEQ ID NO: 14551 - DNA, 472 bp, Glycine max
  misc_feature (134)..(134): n is a, c, g, or t
  misc_feature (166)..(166): n is a, c, g, or t
  Coding DNA Sequence Number=SeqID_4772
tatttatccacactgacctagcgcttgggatcccttaattttcttttcccatggccattgttcaagcgcaacctggctcggcgccaaagcctgcctagatttgtatcccttcctctgcctactctgcccccccngcatgaattattcaacccccccgggagccggncctgagggatctcatacgaaagggaaggggcacccaataggtccccccccccacgtcgtgagcggcttgcacattcggcacaccgaacaaaacaacaacaaaaaaccaacttccccgcaccgccctccatccttataacacgtttcggaaggttccgggagaccgaacagaccccaccccctggaaaaggtgggagggggccccccccccccccccaccccgacaagggaacggccccggcccctccccacgccccgccacccgctgggggttaaatactccctgcgcgcggtttctgcgaaatat

SEQ ID NO: 14552 - DNA, 560 bp, Glycine max
  misc_feature (418)..(418): n is a, c, g, or t
  Coding DNA Sequence Number=SeqID_4773
gaaccgatctgactacggagtctagtaacattgcacagcagcagctaagctctacttcgctggcgatgtaggaaagaaggtatgatgatcgaaatcaatatacgcaggatgacgacgcctaatgcgccgcgtctctagtccactcttctctactcgtctactgtctaacatccccaccacgtctcaatcgtactaggccttcgtagtagacacactccacgtgcatctctcacacacacctcgattggatacacacgacgtatccatctctacccaactgcggatctctcgcgacgcgcgatggtagcactccaagttgacataagcgtctctctgtaacacaatgtacatactagatattatacaatgtactccttcttctccgcactctgtttagcttccctgcagtgtgcacagncagtacaggagactgcgccgacgcgcttatcacttggagtgcacgatcctcttatcgcaggacgcgcctctgatgcacgactgtgagctcgatcagcacgcgctcgtcgcgcgaccgagtgtgcgcgcgaggcaagccatat

SEQ ID NO: 14553 - DNA, 508 bp, Glycine max
  misc_feature (47)..(47): n is a, c, g, or t
  misc_feature (155)..(155): n is a, c, g, or t
  misc_feature (179)..(179): n is a, c, g, or t
  misc_feature (201)..(201): n is a, c, g, or t
  misc_feature (206)..(206): n is a, c, g, or t
  misc_feature (279)..(279): n is a, c, g, or t
  misc_feature (352)..(352): n is a, c, g, or t
  misc_feature (389)..(389): n is a, c, g, or t
  misc_feature (393)..(393): n is a, c, g, or t
  Coding DNA Sequence Number=SeqID_4774
tatagcatacaccagcacatcagaaactgctgcgcgcgacgcttatnctactatcactagcacacatcaatcgctacatatatctactacattgatgacatacaactacaacagataatcaacatacgatcatctactactacatgcatctatcntaatatcttatcacgatacggcanagtctactatactacgcactantctangtgctgctcgtctatgtatatcgagtgcgacagcgtcggtgctactacacagagaagaagattgcgaagatangtgatgtgattatatataactactgattgctagggatgcgacagtgtcgcgctcacacagctccctagagatntatggtgctcgtctgtcacgctgttgtgttgattatngatnatgtatgtagtatctgattgtgagctattcgtatgctcgtgtgtgagtctatgatacgatgtgtactgcttgttgataattatcaagaatagactctcgatcatatgtccacgta

SEQ ID NO: 14554 - DNA, 445 bp, Glycine max
  Coding DNA Sequence Number=SeqID_4775
attggagagatcatgaggcgatagagagagagagagagagagacgctgcctaatctcatcccgttatcttcttccttgtgcgagcttcctccagcgacaatggctttatcggtttcaaacctcgcttcttctctctcgtccctctctttctcttcccaagtttctcagggaccaaacacactttccttctcctggacgaactcgttgttctcattaccggccaaatccgctcgtcgcgcttctctctctgtaaccgccacggtagctgctcccgcggaggtagcggaggatgatacgatggagctaaagaagtacgtgaaatctaggcttccgggaggtttcgcagcacagaaaatcataggcacgggacggcgtatgtgcgccatcgctcgagttgtgctccaagaaggaaccgggaaggttattattaactatcgcgatgcaa

SEQ ID NO: 14555 - DNA, 587 bp, Glycine max
  misc_feature (124)..(124): n is a, c, g, or t
  misc_feature (253)..(253): n is a, c, g, or t
  misc_feature (507)..(507): n is a, c, g, or t
  misc_feature (523)..(523): n is a, c, g, or t
  misc_feature (546)..(546): n is a, c, g, or t
  Coding DNA Sequence Number=SeqID_4776
tgtgtttatttatcttcaccccaaaaaaaaaacaccaccctaatggatggtggaggaagacaagtacccacacaccgccacacccccccaacatagccgtacgccctgtctcttcccctcatancatcatatttctccttgttctgattgcttaatgtagttttgagttgattaaggacaacagttgtctgtatcggtccgcgcgctcgtccctggactccggtccgtcctcacccggaccttaagcgattantcatgctgttgcttgggcgttacttgcacatacaaagcatactgctagtatatacactatcaaacttgtcgtggcgtgttgtgtgtactgcttgtttcgtctatacttcttcaactacttcagatctgtgctgtttattctgcttctcttcattggctggtcacccgcctgccgcccatatccattcgcgctctgtcgcgcgagcgaatacttgttctgtgggctttggtctgtcctcttctctctcctgtcgncttgtggcgccgtgcnctgccactgtgcatacttctgcntgccgcgacccatgcctctcgtgctgtgctggctcgttcgt

SEQ ID NO: 14556 - DNA, 286 bp, Glycine max
  Coding DNA Sequence Number=SeqID_4777
gaaggtccaagtatagatgcaattagaagacaatcactgcattgcttattcttctcaatatggaagattctcggatgtcattgctctgaagacacccaaaccttaaggacatgcgtgtgtctagctcaatgaaggcactgcagcatgcaatgcagtgcgacaaatgcaaaactatcctttctatgacaaacctatgagaattcactgtgcaaatacaaaatcagactgtattgctaaagaagaaggtacttatgtgccaaaggaaaacaagaataatcactaggat

SEQ ID NO: 14557 - DNA, 440 bp, Glycine max
  Coding DNA Sequence Number=SeqID_4778
aaatcatggccggacgcagctttcctgatgaccagtccacacgagggcaaccgcaaactgttgcaacgcgccttgaaactgccgcaggtcagcgacggcatgattcacgggaaaccggcacgtctgatcctcacaaaagaggccacactcacacgatattcccccacgccaacggtatgccgcgaaatccaacatcatctaaactactccccgctctctgaacatgccttccattgaattctgctgggcgggtgccaggaaccctcggaatcatcccttgggccgcaatatttaccttatcgtaataagagccccccccggcggacaccgttgaatctgacactgaaaagaacctgtaccaagtaaaatctcgcgaaattttgccccgcccatcccaattatcgtctaactctcttgccgactataaaacatcccttgcg

SEQ ID NO: 14558 - DNA, 452 bp, Glycine max
  misc_feature (239)..(239): n is a, c, g, or t
  misc_feature (352)..(352): n is a, c, g, or t
  misc_feature (412)..(412): n is a, c, g, or t
  misc_feature (418)..(418): n is a, c, g, or t
  misc_feature (424)..(424): n is a, c, g, or t
  misc_feature (426)..(426): n is a, c, g, or t
  Coding DNA Sequence Number=SeqID_4779
atattaaccgtatggacgtccccatctgcgcaccactatcctccgccaatcaccagcggcgcggcgagcggcgatcgcgcgttcggatgagcgaaccactccctcggaacccgactattcgtacacatactctactctctcagcagcacgttcatcatagaagtgtctgctcctcccgtgtctgcgccgtccggccatccatcatcaccctagaacgactgatatattccgctacgcancactccggtctgtcgtgttatttatatcttgttgtagtgacgcatgcactcatgcgtctcgccggtcgtctctctggcggcgcgtgccggttgtgccgcccttcgcgccgatnggaccttattgtgttgtgtgtgagtgggagatgtactctattagagtattatacagccancagtancgaatnanacctaccatctaaatctcactcatga

SEQ ID NO: 14559 - DNA, 485 bp, Glycine max
  Coding DNA Sequence Number=SeqID_4780
gaattgagcaccttggttcatatccattccgctatattgttgaggcatttgttgttgttgaggaattgtagatccataaggcatgtaacccattggagcaacaattgtttgtgcaggcatataagtagatggtacataagtgtatgcacctgcatccataccatagttatcaacactttccatttgcttcttcttagcttcttcaagtgccttttgttgttcttgtaactctttttgtgcttgatatagttcatcaactttgctagtgtactcacgtactacttgaatcatgtatggcatgctcatgtcttgaatcttgtgacgccatgccaattccatagcaacatcagctctaatcaaattgtaacaattgtacaagcatgcagcaaagcagtcttttagacccttttcaacaaagaatgtgagtaaatcctcagcaacactttgtttcttgctttgtgcagcagtttccattgcatccaagt

SEQ ID NO: 14560 - DNA, 548 bp, Glycine max
  misc_feature (168)..(168): n is a, c, g, or t
  misc_feature (198)..(198): n is a, c, g, or t
  misc_feature (200)..(200): n is a, c, g, or t
  misc_feature (218)..(218): n is a, c, g, or t
  misc_feature (319)..(319): n is a, c, g, or t
  misc_feature (326)..(326): n is a, c, g, or t
  misc_feature (330)..(330): n is a, c, g, or t
  misc_feature (388)..(388): n is a, c, g, or t
  misc_feature (400)..(400): n is a, c, g, or t
  misc_feature (486)..(492): n is a, c, g, or t
  misc_feature (509)..(509): n is a, c, g, or t
  Coding DNA Sequence Number=SeqID_4781
catctctaccactgacctgaagatatcacaacatcttcccaggcctacatatctaatctgctatcaccatatctctatctttctgtctctcgctgtctagtgatacagagtgtgaggcccgcttacatgacacatacgcaggtgcaatgccatagcgtactcggagancgaatccccggtccacgacgtttgagtgtngnagtagctgtgtttgtgcntgctctgctgctcagcagctgtgcctgagagatgacgaggaggtgatagaccgactgcaactctctcctctgcgttcgccgcgtcctgtctggacgagcanggagggngtanagcagacgccgcctctcggcacagcgcagaggcagagaaaggaacgagagcggctgcnccgcgtggagcnccggccgcgccctgctgcgcgatgagtaggagaccggcgcgcagtctcgcaccaataatatgctgtgcaaacagaagataaggggnnnnnnntatatacacaaatttcnttctaatctcaccagtgtattttacgttctgctgtgtta

SEQ ID NO: 14561 - DNA, 435 bp, Glycine max
  misc_feature (58)..(58): n is a, c, g, or t
  misc_feature (64)..(64): n is a, c, g, or t
  misc_feature (83)..(83): n is a, c, g, or t
  misc_feature (114)..(114): n is a, c, g, or t
  misc_feature (119)..(119): n is a, c, g, or t
  misc_feature (129)..(129): n is a, c, g, or t
  misc_feature (165)..(165): n is a, c, g, or t
  misc_feature (170)..(170): n is a, c, g, or t
  misc_feature (173)..(173): n is a, c, g, or t
  misc_feature (191)..(191): n is a, c, g, or t
  misc_feature (205)..(205): n is a, c, g, or t
  misc_feature (232)..(232): n is a, c, g, or t
  misc_feature (274)..(274): n is a, c, g, or t
  misc_feature (309)..(309): n is a, c, g, or t
  misc_feature (315)..(315): n is a, c, g, or t
  Coding DNA Sequence Number=SeqID_4782
cgttagtgtgtagcgttcggtacattagaagctgagcatcagcgagacagcagtactntagacntctgacgctacgacatatncatccatcatgtctgctatcgaagtgatcgnatganatgatatacngtaagatatgacatgcgattacgaggcacacactgntcctnctnaactacgatgctacattnactaacgatctatnctgtaatcggaggcgatagagtcatgnctgaccgtaccgtgagcgacacgagcctagttggcagtatangagcgcggtacagtgcgacctagagtggtgagtantgtgcntttgacgcacgtgtacgagtcggcgtatgagtctacgtgtagactacgacagttgacgtatcgcagtgcgcgaacgtgtgatagagcactgatacgctacacactctctacgcgtatatg

SEQ ID NO: 14562 - DNA, 509 bp, Glycine max
  misc_feature (382)..(382): n is a, c, g, or t
  Coding DNA Sequence Number=SeqID_4783
attgagcgcccgtcggacgtcgtgcgcggcgcagggttttgccgagattttcctaaaaaagggccatcgccaccgtaccgagaaaagaaaaggggaatacgaggcgaaaaaacacacaaactcctcctcctcatcgcctctcctcgccccctctgccctccctcatcttcctcccgttcggttgtggctccttgttccctcacgattggtgcccgggccgcgccgccatcgccatggacggcctgcacggcgcggacgcctgcttctcccccgggagggccatgtcgccgcaggtccggccccccgccggcccgccggacgtaggcagccactacttgacggagctgttgcaggagcaccagaagctcgtcccgttcacgcnggtgctaccaatctgcagcaagctgttgggccacgagataatgcgggtgtcgtccttgcttaagcaccagcatggtggggactttgagaggttgccgccgatggcgagtccaaaccagatgcatcat

SEQ ID NO: 14563 - DNA, 516 bp, Glycine max
  Coding DNA Sequence Number=SeqID_4784
aattgctcatcattgccttcatttcctcccataaattcattcacatctatccctgtttgatatatcattttcaatacattcttcactgctccttctcttcttttcaatacatccaactctttctgttgcttcactactaactcctttaaaccttgactaccatcttgtccccaaccagaattctttaattccataaaaaacgctctgagtttctcattttcttctcttactgcttcagcatattcttctaattctctcttttcttggacaactctttcataatcttctctctttacaaactcttcacttcctaatgcatctctcaatctttccaacattgtttcttgtgcatgtttcacattatttgctgcttccggtgcttttctttccttttcttcttcatcaaatgccagattattggtccaatttttaatctcatttattgatcctcctttgccttttaaatcttttgcatctctttgttccatacttaatgtcccttcatctgttagcaag

SEQ ID NO: 14564 - DNA, 565 bp, Glycine max
  Coding DNA Sequence Number=SeqID_4785
actacaaccaaatctcacaatcaaatctcacattcacattaaccatctgatttcgttatggctcgtaccaagcaaaccgccaggaaatcaaccggaggcaaagccccgaggaagcagctcgcgaccaaagcggcgaggaaatcagctccggccaccggaggagtgaagaagccgcacaggttccgtcccggaacggtggcgttgagggagatccggaagtaccagaagagcaccgagcttctcatccgcaagctccccttccagcgtctggtccgcgagatcgctcaggatttcaagacggatctgaggttccagagcagcgctgtggctgctttacaagaggctgcagaggcttacctcgttgggttgtttgaagacacgaatctctgcgcgattcacgctaagagggttacgatcatgccgaaggatatccagctcgcgaggagaatccgtggcgaaagagcttgattggttcttcaatgagcaatctacttggtttgattaggtgtagttgctttgttaagttagtacttaaggtgttcgacgaaatatcccaagaaaagtt

SEQ ID NO: 14565 - DNA, 412 bp, Glycine max
  Coding DNA Sequence Number=SeqID_4786
gggagaggcttttctcaatcccttttaggacagggttttttttggagaggaacaagaataaatccctctgcggttttgaagggattttcccaagaaggccaggcgattgtcggtccaagaaatttttcaaacgcgcaagatttgttaaaattcccgcatttttaatttgtccccttaaaaaggggatcccttttttaatgggtaaaaccaaggctccccaaagtcttttttttttttttggggaagaatttccaaaggtccaaagggggtttttttttccggccggggttttttcccccgttgaccccttcaggaaagttttaaggggttttacccttgccaaatttgggaaattaaagcccaaaaagtttcaacccgtagaggccctccttgggtttgaaatccccgagct

SEQ ID NO: 14566 - DNA, 568 bp, Glycine max
  misc_feature (31)..(31): n is a, c, g, or t
  misc_feature (35)..(35): n is a, c, g, or t
  misc_feature (50)..(50): n is a, c, g, or t
  misc_feature (52)..(52): n is a, c, g, or t
  misc_feature (54)..(54): n is a, c, g, or t
  misc_feature (71)..(71): n is a, c, g, or t
  misc_feature (83)..(83): n is a, c, g, or t
  misc_feature (85)..(85): n is a, c, g, or t
  misc_feature (108)..(108): n is a, c, g, or t
  misc_feature (128)..(128): n is a, c, g, or t
  misc_feature (163)..(163): n is a, c, g, or t
  misc_feature (170)..(170): n is a, c, g, or t
  misc_feature (182)..(182): n is a, c, g, or t
  misc_feature (190)..(190): n is a, c, g, or t
  misc_feature (306)..(306): n is a, c, g, or t
  misc_feature (308)..(308): n is a, c, g, or t
  misc_feature (333)..(333): n is a, c, g, or t
  misc_feature (382)..(382): n is a, c, g, or t
  misc_feature (394)..(394): n is a, c, g, or t
  misc_feature (397)..(397): n is a, c, g, or t
  misc_feature (404)..(404): n is a, c, g, or t
  misc_feature (423)..(423): n is a, c, g, or t
  misc_feature (464)..(464): n is a, c, g, or t
  misc_feature (483)..(483): n is a, c, g, or t
  misc_feature (485)..(485): n is a, c, g, or t
  misc_feature (511)..(511): n is a, c, g, or t
  misc_feature (525)..(526): n is a, c, g, or t
  misc_feature (528)..(528): n is a, c, g, or t
  misc_feature (536)..(536): n is a, c, g, or t
  Coding DNA Sequence Number=SeqID_4787
cgctgcgcagctgttgtatagtcatgatgtncatntcatcgactacgtcnancntctccgctctgctcgcntcacacatctgntncgcacgtgcacgcctgctcttcnctcgcagcgtcatcgtatcncgactgtggtgacggtgcgtgcggctacactatantataacncgacaaagtagntcacgtgnctgcaggcgtcgcgcgcgcgtgcgtcgcggcagcgctgtggcgtaactaacacagcggtcatgcgcgtgtgtctacgaccctagtatctgtcgtatcgtgcgatctactcattagntnagtgactgcagagtcgctatacgcnctgtgtcgtcgcgtgcgtctgtctgtgagagtataatataagtcgtcgntgtgtcgccctnctncacactncgtcgctcctcatctctgntgtgttggtgacctgtatctctactttctgtctgttgttcncgcgtgctcgctgggcgtngngcccgcagtcgtcgcgttgccgcggnggcatgcatactanncntacagagnagcgcacacagcgctgcgccatgctgctgagc

SEQ ID NO: 14567 - DNA, 195 bp, Glycine max
  misc_feature (123)..(123): n is a, c, g, or t
  Coding DNA Sequence Number=SeqID_4788
gagatgaagctttaattactgacaaactgaggagttgtattgaagatcaaaattcaaggcatgcataaaaagtgaaggaagcaaaatacaagattgctgcagctaaggaaaaggaaaagggtnttaggcagaagttgcagaatgagatggttaaagcctgttttgtcaaaggcggttcctctacgaatggagaag

SEQ ID NO: 14568 - DNA, 177 bp, Glycine max
  Coding DNA Sequence Number=SeqID_4789
gagtccttgagaaggcgctcttgatcgagacttgcgcgcgcgtgtggtggagagagagagagggttcacgaacggtgcaaatgttatagctgagagtgtagaagttggcctcacagccttcagcacaaacgcaaatcctttgaacgccagaggcgaagcacaacgaagtaagggaca

SEQ ID NO: 14569 - DNA, 562 bp, Glycine max
  misc_feature (30)..(30): n is a, c, g, or t
  misc_feature (129)..(129): n is a, c, g, or t
  misc_feature (157)..(157): n is a, c, g, or t
  misc_feature (260)..(260): n is a, c, g, or t
  misc_feature (391)..(391): n is a, c, g, or t
  misc_feature (513)..(513): n is a, c, g, or t
  Coding DNA Sequence Number=SeqID_4790
ggagtgtgtaatatggatcagcgactgcgnatgagacacgactgagaagagaatgagatgagcaacacgatcatactcctctgacgctgagacagaagtacatcattgatccagcaccaccaccaccantcatctacacaccgatactacaggcgtntaatagatgctactgataatatctaccgtgtactataaacactacataacaagcgatagcaacactcattttggataactatctgatacatctcgctcacacntcactcactgcaccagcaaatctgaatacgacacacgacacactctacacgcaaccacatactccactctctatatcagcctcaaatacaagacatgacggatatatatgattgtcatcatgtatacgccncacatctctcactctaatgtacttccagcatctgagtctacgacatactactgtctctactgcgcgcactcactcgcacactcccgactacgctcacaacaccgcgacgcacaataaccaancactcattatatatcataccacctgcttataagcatgcgagtcacgtac

SEQ ID NO: 14570 - DNA, 310 bp, Glycine max
  Coding DNA Sequence Number=SeqID_4791
gaacctgttcttcaatgcaacttgactttaacaaggtaggcaccagtaatttcctggtttcgattgctggcccgataatgcccgccatccctttttaggcgtcatttctactaggagccagtgagacccatgctgtattcatagtattgaggacaggaacaattatcatttagcaacaggatcatttcgtaccctagaagtcccatgtatagacaagggttatattaacttccccatctagctcatatagattgggcggtaggtctgcggggataaataatacacaccttaccacagtcagttagagcag

SEQ ID NO: 14571 - DNA, 510 bp, Glycine max
  Coding DNA Sequence Number=SeqID_4792
atcaagtacccccttttcacatagtgccttttgaaggtttgtttccaagggcggaagtctttctagaagcaggagcgagtgttttatttaaggacagagggggaaatacacctcttcatgaagctcataccggtggggatagaaatatgatcaaaatgcttgaagtggcaaaagcttctcagtgggtggagttgtccaataatattcatgaaactcaagcaaccccaccagatgaaattccgaaaaagagatgtatagtttttcctttccccccatgggatgttcagaaagcggatagaaaagagggagtggtcctaacggttccccaaagcattgaagagtttataaagggggggacaaaccatttggaaattccaaacgcttcctgtattttgtcagaacaatgtggcaaaattgtttatgtgggccggtttaccaatgatgggaagctttttttagtgagtgaagcccagaatgaatgaggtgaaatgttcagcagtcccaacccca

SEQ ID NO: 14572 - DNA, 493 bp, Glycine max
  misc_feature (138)..(138): n is a, c, g, or t
  misc_feature (196)..(196): n is a, c, g, or t
  misc_feature (222)..(222): n is a, c, g, or t
  misc_feature (284)..(284): n is a, c, g, or t
  misc_feature (339)..(339): n is a, c, g, or t
  misc_feature (343)..(343): n is a, c, g, or t
  misc_feature (355)..(355): n is a, c, g, or t
  misc_feature (373)..(373): n is a, c, g, or t
  Coding DNA Sequence Number=SeqID_4793
ccatgcagcgatttctattgttcctgttcgtctctcgtgatctgtgcgcgcatcgacatgtgcttctacagtcatggctgcggcatattcattcctcgctgtctgtgcgcacgcgtactacggcagcgatgccttcgngtatacacttgtacatatatacactgcattgtatgtatcacgtagttgatatgatagngtgcgtacgggtacgaggagaacatnacgcagtgatatgaagtgtgtagactgccgcgctgcgtgtgtgctggtgcgctggtgtggtngtggtcgttctatgctgtgtctgatgctgctgtcgctctgtctcaccacatatanaccnactcatatagtntatattattctgcggctnctctaccctcattcaagcgtggtcagctctgactatatacaactcgtcgaatgtagatctcccgctatcgtccttcttgctcgcgtctaccgatatatatacactgctgctctatctact

SEQ ID NO: 14573 - DNA, 226 bp, Glycine max
  Coding DNA Sequence Number=SeqID_4794
gggagcctaggatttcaagattggggatgaatttcgagagtagggtcgatcgtgtgggagcaagtaggaccgctctgtaccaagggggtacttttaaggagcctgctagaataaaacaccggccctatgactatagcagaggtggaaatcctaggggagagggtttagaaggtttagtggcaaagcttgatggaggagagagaggccggagcttcaccacaggaag

SEQ ID NO: 14574 - DNA, 470 bp, Glycine max
  Coding DNA Sequence Number=SeqID_4795
tctcaaaacatgttcgatcgcgaattagaaattaccccaaattctacaagtgcacaaccgaaacattcacaggaatggcagtaacgcgtcgaaacttctcaaacttcgaaatgcacattcagagtattcacatgcccacaaacatcacgagataaaggtgcccaaccacaaagagagaggagcaccccacaaagcaaatagaccaagccgataagaaataaaagactttccatcagacacccacccactacgactaggtagcccaccccacaggcaacccataaatccccgaaagacactgcgcaacacaaccaggaaactcccacaaaccggggggacacgcaaccccaccccacagcgcgaaaacggccgacggcccccccgggccccccggggacgcccgccctccggcgcagcttccttcgcgaataccgatggccccgagtagaagcctgaaggcgacacgccag

SEQ ID NO: 14575 - DNA, 433 bp, Glycine max
  Coding DNA Sequence Number=SeqID_4796
atatcgacacattccgtccatataaactggaatatcgggagtgaaagtgacagtaacagtaaatatgtatttatcaccaattagtatgccgacagataaatacaaactcctatatataggacaaatatttacaattcttagcttctttcctaaaatcataccaaaaatctttattcgaaacttctgtatccatctcaagctctattaaagatttttctcttcttaaggtattgcataaaccacacagcagggaccctgaaacatcaaaagatagttttacatgaagtaatgcccctagctgcgcctttaaataagggtttttaaaaacggtttcttgaaattttcttgaaataccgaaatttatgtacaaaccatcttttgaaattgggtgggaaaaccttaaggaaaggcttctctccttgaaaaaattctt

SEQ ID NO: 14576 - DNA, 280 bp, Glycine max
  misc_feature (58)..(58): n is a, c, g, or t
  misc_feature (94)..(94): n is a, c, g, or t
  misc_feature (105)..(105): n is a, c, g, or t
  misc_feature (136)..(136): n is a, c, g, or t
  misc_feature (138)..(138): n is a, c, g, or t
  misc_feature (147)..(147): n is a, c, g, or t
  misc_feature (177)..(177): n is a, c, g, or t
  misc_feature (179)..(179): n is a, c, g, or t
  misc_feature (192)..(192): n is a, c, g, or t
  misc_feature (202)..(202): n is a, c, g, or t
  misc_feature (246)..(246): n is a, c, g, or t
  misc_feature (250)..(250): n is a, c, g, or t
  misc_feature (252)..(252): n is a, c, g, or t
  Coding DNA Sequence Number=SeqID_4797
acattccctcgaattacaatgattaacactaacattacaatatcttacaacatttacnaactaaaatagcaaatgcaattgagttggtacaatntttccaacttnaagttaaattaatgtattaggaaataattgngnaaaactttnattccacaagtcacttgtaggttctgaagntnatatgtcactatnaggagacccnaatgattcatagccatagtctgacttcactgcatcagttatatnactncnaggggacaaaggctcatctttaaatgta

SEQ ID NO: 14577 - DNA, 379 bp, Glycine max
  misc_feature (51)..(51): n is a, c, g, or t
  misc_feature (65)..(65): n is a, c, g, or t
  misc_feature (67)..(67): n is a, c, g, or t
  misc_feature (199)..(199): n is a, c, g, or t
  misc_feature (318)..(318): n is a, c, g, or t
  misc_feature (340)..(340): n is a, c, g, or t
  Coding DNA Sequence Number=SeqID_4798
gacagcgaccgcgttaagcaagcaagcaagcttaccaacacaacacctggntgcagcgattctcngnggtccttcattgatctctctttctttcttgggcgggaaaacgaaatcgtctagggtatcgatacgttccgcaatgggagagaatggcagaggtgggggtttcggataatttgaaaggtctaatactggcgangggttctagtgcattcatcggttccagcttcatcttgaagaagaagggtcttaagcgtgctgctgcacgcggtactcgtgcaggagttggtggttatacttatctacgagagccgcttnggtgggctggcatggtaacaangataactggggagatggcaaacttggtggcttatatcta

SEQ ID NO: 14578 - DNA, 236 bp, Glycine max
  misc_feature (45)..(45): n is a, c, g, or t
  Coding DNA Sequence Number=SeqID_4799
tgtccactttatctggtccatcatttggagcatatgttggaattnaagttgctgaagctttaaccactgataactgttgaaccttgaaaatcgttggaaaagaactttcccagggcatttgggggtccgaattaacattggtcgggggaaagggggcccaacgaactttccagtttcttttttggggaaaaaaaagtctttccccccggccccccattggtttttcatgggatagg

SEQ ID NO: 14579 - DNA, 461 bp, Glycine max
  Coding DNA Sequence Number=SeqID_4800
acatcggcgccgtaacatggcgtctcggggaggttacgacggcggctccgccacgggaggcaagatccgtaggcgccctccctcccgcgtcgcagctgcctcaccctatgcgcgcccggctgctcctactcatcctgcgtcacgcggcggtgaagggagcggctggctcgcccgtctcatctccggtggcgcatcgcgcctcctctcctctgtgtttcgcaagccgcctcctcagctcgccgcgcctacgctttcggaaccagagttggtcgacgctccttgctcgccgctgccgccgcctttagagaacgacattctagaagaagaaaacggaggagggactgctaacaatctgtctactgataatcctgaaaattctcccattgatggagatgacattctaagttcttgtttcaatggtagtatggatctagaagaattgttgaagcagaaaaccttta

SEQ ID NO: 14580 - DNA, 503 bp, Glycine max
  Coding DNA Sequence Number=SeqID_4801
gaggaaaggccgcttttaattatggggaaatttcccctcccctttgaggacggggaactaagggaatttgaagcataacaccccctttgtcaacattgaaaaatccgaagttcccccctgaggcatttgttaggttgaacaacccacaatttttggattttgggaaaaattccccttcccttccacaagggcttcaatctttgccaaaggagttaaaaaatcttctttggaggcattaccctttgacatgcttgccaaaacaattttctgctgaaaagcttgttatattaaacttgtcctgtaccaaaggggaaaaattatggcctgaagggaaagtaaaaaggttccccccttttacaaaggccccccaattccgcaaagcttaattaaaaacttaatctgacccatcaactcttattttgttgaaaaatctggggaatttaaagaatgttaaaccccgttggggggtattccggaatgagcttccagacttctcaaaatcc

SEQ ID NO: 14581 - DNA, 531 bp, Glycine max
  misc_feature (74)..(74): n is a, c, g, or t
  misc_feature (153)..(153): n is a, c, g, or t
  misc_feature (450)..(450): n is a, c, g, or t
  misc_feature (496)..(496): n is a, c, g, or t
  misc_feature (506)..(506): n is a, c, g, or t
  Coding DNA Sequence Number=SeqID_4802
gctcgacgcgctctcattataaagaatagcacagagaggctcacaccgcgaacctcaccgccgtcgacgtacanctcaaccacttcacatcactctctatactccaattactacttgatcttatccaactcgcctgcgcgtcgcgctactctnctccgccgcctctatacgacacagcacgttgagctactaactactacctatcatcgtattgatccgtattcatatgtggctcgattgtgattgcctcgccgcgccgcgtgtgttctgtgcctcccagattcgcttgattgatgctccacccatcgtggtaacgcccttcaagcatcaattattatgatataatatagaagtgaacatcacaccagtctctctatctatatactaaatcagttcacaaatcaccatagattattatgtcacacaacctactactctagcgctagcacnatatcttgaccaaacacaactactctcacttcctctctagaccatncacttcacanactccactcattctaatactcttca

SEQ ID NO: 14582 - DNA, 575 bp, Glycine max
  misc_feature (438)..(438): n is a, c, g, or t
  Coding DNA Sequence Number=SeqID_4803
gcgtccggttttggcgacactcattaatgatgttctagatctttctcgacttgaagatggtagcctcgaattagaaaagggaaaattcaaccttcatggtgttttgggagagatcgttgaactgataaaaccaatagcatctgtgaaaaagttacctatcaccttaattctgtctcctgatctgcctactcatgccattggtgatgaaaagcgacttacacaaactcttttgaatgttgtgggtaatgctgtcaaattcactaaggagggctatgtttctataagagtatcggttgcaaaaccagaatctttacaggattggcgacctccagagttttatccagcatctagtgatggccatttctacatacgactccaggttaacgactctggatgtggcattcccccacaaaaaattcctcatctttttaccaagtntacccactctcagagtggaccacctctacctatcataggtgcaagtctttgacttgccatttgttaaaaatttattaacctcattggatgcctcgtatttatttacatttaaggtcctgacgaacaaatcatctcta

SEQ ID NO: 14583 - DNA, 486 bp, Glycine max
  Coding DNA Sequence Number=SeqID_4804
ggaaattaagacacggcattcattaataatggaaaataagaagagaaagggaaaagacgatggggtactggaagaagaagaagaagagatgatgaacaagttttacacgctgttgcggaggttccgagacgcgcgcgatggacgacgaaaggagcttgaggaactacagaagagtgagaggaagaagaagaggagtaaagtggggacagagcaacaccatgtttgggtgccatcgtttgaattggaagatttcataaacgaggctgaattcagaggacaacaacctctgcgattcccaacttcatctgcatctccttcgccacgtggcggtggcacagacaaacaacgtaagaacgacgaccaacactctcactctctggatctcaacctctctctctagctagctagctctatatcctctttgaatccttattctctccctttttccccagaatttaatttttatcatgaaaattgtaaccaagt

SEQ ID NO: 14584 - DNA, 529 bp, Glycine max
  Coding DNA Sequence Number=SeqID_4805
gcacttatgtgcgatgtgtctctcatctgttccatttattctcatctcctagtttatatttgtgattatacttctattgcacaatctcctacgactctagctatctactctcatacatcacctacctgtctcatgcagtcggctctctcaggagaggagagtatggcgactcgcacgctcgcgggggacgtgtaggcgtatttttctcttgcttcgttcgttgctatattacccatcgtgcataactccactctctcgttgccgtcctccctctccagtcttcattctttcactttctcccccacctacctcactcacatccccacattcagccatgctactctgacacacgaacctgcacacttaatacgaccccggtctaatccatgtagtagttccagttctctcttcattttctttttgtgggagaaaaatatttccttctccgctctctttctatcaaacttcgtttcctactctcaaatcactatgttacgggataaactatgtggatacacacatcctcctt

SEQ ID NO: 14585 - DNA, 440 bp, Glycine max
  Coding DNA Sequence Number=SeqID_4806
gatattcctggagatcgacagaccaatttacatcaacctcaacagggtctcttgcccgaccgttgcggacctcatcaattcattgaggacggatggcgccatgaacgcggatatcactgagttctcgagcatcagaagtgtcctacctaaggagcatgttctgagtttcgacacatgcgctggtgatctatgcggacaagggctctaggacaagaaggaggggacagatattactgatgtcgagatctaccccacatccatgacggcaaagagtcatccaaggtacagcaagtacaaggcttgtcgcttgatgtaatgcggtgacggtctccctaaggaggcccatgctgccgacgacacccccaagaccaagaggactggtgaaaatgtggagcggcgaccaactggatctgagtgtgggatcaagtaccacccagctt

SEQ ID NO: 14586 - DNA, 440 bp, Glycine max
  Coding DNA Sequence Number=SeqID_4807
atatcaccaagctttacattcctaagaagtgctctgccacaaaccaattgattaccactaaagaccatacttcagttcaagttaacattgagcatgtggatgaaaatggcatctacaatggccatttctccacttttgctctctacagcttcatccatactcaaggtgatactaacaataccctagatcacttataacaaaagaaaaaagttaaagttaagcaacagtagacacccataatagtttattactttactatgtattaatttctactcttactagagatatttaagtactataattatcatcttaagcaaatactcattctaaattttcgttaatatttgataccaccaactaaatttacttttttaacaatttaccaatacattaataaatatgtagttatcttatatttcaatcaaacaagctaaagaggg

SEQ ID NO: 14587 - DNA, 594 bp, Glycine max
  misc_feature (34)..(34): n is a, c, g, or t
  misc_feature (275)..(275): n is a, c, g, or t
  misc_feature (416)..(416): n is a, c, g, or t
  misc_feature (462)..(462): n is a, c, g, or t
  Coding DNA Sequence Number=SeqID_4808
gttgtttacaccacacgctctttgtcgcgttttntatttagggcggcgcgcggcgtgcgcggccccgcgccgcccgcggcgttcataatatacaccggcccgcgatctccgcacactcacaataccatatcgggcgagcacgcgcgattactctacaaaaagtagccgcgggcgatgagctatcgaatatttgtataatattatagtgagtgcgtattataaactggcgcgtagacgatggcgcagcatatatatttataagataattaagcggngcgccactaatacatatctatggctgccgctgagtatattagtgtaggatatacacacacgcgccgcggggcggcatacacgcgtctagatcgcgtgcttgtgtatgtgggcggctctctcgggtcctcacgcaatacctnttcaccacaactcatcaagtcgcgacaccgcagcgcagatataggnttctcaatcaaatatgggtatataccacacggggcgaagcgcggcacgcacataaacgtacaccgctatcctggcgagcgcggcgggttgtctgcgaggggcgagataatggcggagggtcacataaacggt

SEQ ID NO: 14588 - DNA, 499 bp, Glycine max
  Coding DNA Sequence Number=SeqID_4809
ggcgcgcacgtctacggtgccctgttcggcggctatggccaccaccaggccgctccgatgccgccgccgcagtacccggtgtggccggggatgtacggcagcgtggcgcggtccgcggcatacggcggcatgaccgtgccggggatggtgtggaggccgacgccagtgggtgctgatgcttttggtgccgccggccggcacgatgaagcgacggcggccgttgctggcaccggagaggtgcctggtaagggtgggcacaatgcggtgatgagcgtggtggcgacgctgccgtcgtgcctcaccggcgggtcgcccacggagatcggtaggtccgaaatgatggggcagaaggagggcgttgtaagcttggacctctgtctgtagttcgttgcaattactgtcgatctaggtgttatctttaccggaattgttcaggtcaatcaccatgtttagtcttatataattactgttaccatctgtaaccgagggcgttcatttg

SEQ ID NO: 14589 - DNA, 277 bp, Glycine max
  Coding DNA Sequence Number=SeqID_4810
accttcaccatatctaaacctgacgttaatgacggaactatgggactcgtggatcacgggaagaccacgcttactgcagcaatcaccagtgtgcttgcggatgaagggaaagctaatactgttgccttcgatgagatcgattacgctcctgaagagaggaacagaggaatcactatagcaaccgcacatagggagtatgagactgcgaaaagagattatgcacatgtggactgccctggacacgcggattattttagaaatatgattacagtagctg

SEQ ID NO: 14590 - DNA, 407 bp, Glycine max
  Coding DNA Sequence Number=SeqID_4811
aacttataagattaggaaagctgagaaggttctacaaagggagtttaagtttcccgtccttggaggaattcacagtatggcgttgcgagaggatggaaagtttgtgtgcaggtacagtcaaaacagacaagctgttacaagtgaatattagtttgggcggagatgttatcccattggaaactgatctcaactctgccatgcaaaaccgataggcatttctggccagggcaatgactccaatattagagttagaggagatggattcaataaaaagaaaatggttagaggagatcaacaaattaagtggcccggtgcctaccaaaaaaaaaaaaaaaaggggcccagttttattatatttgtttgtttgtgaataaaaaaacgagtgtgcgtgtggtctatacagttag

SEQ ID NO: 14591 - DNA, 560 bp, Glycine max
  misc_feature (56)..(56): n is a, c, g, or t
  misc_feature (67)..(67): n is a, c, g, or t
  misc_feature (215)..(215): n is a, c, g, or t
  misc_feature (283)..(283): n is a, c, g, or t
  misc_feature (457)..(457): n is a, c, g, or t
  misc_feature (470)..(470): n is a, c, g, or t
  misc_feature (474)..(474): n is a, c, g, or t
  misc_feature (484)..(484): n is a, c, g, or t
  misc_feature (499)..(499): n is a, c, g, or t
  misc_feature (505)..(505): n is a, c, g, or t
  Coding DNA Sequence Number=SeqID_4812
cgtcgtgcctaagaactatcgtggagggtctcacccggattcgcacacagtacggnacgtgtgcttnacgcatggcgcagagagagagttcgattactggatttctagttcatagtgactagggtcacaggtggtggagagtgcgaattgttcggaggtagttgatcaagtagatcgttataggatgacgcgcgatagtcatactttatgttgtntgcgctgttgtctatattgggtgtagattcgtgtcgatgatcgagacattgtgtttgccgcttcatcntcctggttcgtctatcattaaaatgaatcattacatatatactatcaccttccgtgtgagaggtatgtgtgtgaactccgggagagatggcgtggcggtgggtggcgtatatggggaataatgacgacacacgagtgttgagtggtgtggcagtagagatgcagtgtgtgcgtntgtgggtgagtgnttgnttcagtgggngtccgcggggcacanatccanccggggggggtgtggtttataatacatatacaacaatatatgtgtgcggtgtgat

SEQ ID NO: 14592 - DNA, 214 bp, Glycine max
  Coding DNA Sequence Number=SeqID_4813
accacttgtcttaccataccttcatcacatctctctctctcccccccccgccctctcaattttgtgagattatttcctttttaggctttctcccctttaaagctctcttagggttaggtgaatctctgtcgtacgtctccccttgtaaggaagctttactacgttttgatgacaaataatctttgaactttttgaagcaagtcatcagtttttc

SEQ ID NO: 14593 - DNA, 126 bp, Glycine max
  Coding DNA Sequence Number=SeqID_4814
tgaaggcaccgaccagcgctcttatgaaagggacacgaaaatcatcatatgcgacatccttccccatcgagagataagagcacactatcgcgcatctgcccttccggccgatgcacagagacccca

SEQ ID NO: 14594 - DNA, 564 bp, Glycine max
  misc_feature (31)..(31): n is a, c, g, or t
  misc_feature (37)..(37): n is a, c, g, or t
  misc_feature (43)..(43): n is a, c, g, or t
  misc_feature (49)..(49): n is a, c, g, or t
  misc_feature (51)..(51): n is a, c, g, or t
  misc_feature (53)..(53): n is a, c, g, or t
  misc_feature (55)..(55): n is a, c, g, or t
  misc_feature (80)..(80): n is a, c, g, or t
  misc_feature (93)..(93): n is a, c, g, or t
  misc_feature (97)..(97): n is a, c, g, or t
  misc_feature (153)..(153): n is a, c, g, or t
  misc_feature (160)..(161): n is a, c, g, or t
  misc_feature (163)..(163): n is a, c, g, or t
  misc_feature (178)..(178): n is a, c, g, or t
  misc_feature (190)..(190): n is a, c, g, or t
  misc_feature (236)..(236): n is a, c, g, or t
  misc_feature (242)..(242): n is a, c, g, or t
  misc_feature (262)..(262): n is a, c, g, or t
  misc_feature (264)..(264): n is a, c, g, or t
  misc_feature (267)..(267): n is a, c, g, or t
  misc_feature (297)..(297): n is a, c, g, or t
  misc_feature (309)..(309): n is a, c, g, or t
  misc_feature (314)..(315): n is a, c, g, or t
  misc_feature (335)..(335): n is a, c, g, or t
  misc_feature (353)..(353): n is a, c, g, or t
  misc_feature (358)..(358): n is a, c, g, or t
  misc_feature (367)..(367): n is a, c, g, or t
  misc_feature (373)..(373): n is a, c, g, or t
  misc_feature (406)..(406): n is a, c, g, or t
  misc_feature (415)..(416): n is a, c, g, or t
  misc_feature (431)..(431): n is a, c, g, or t
  misc_feature (445)..(445): n is a, c, g, or t
  misc_feature (484)..(484): n is a, c, g, or t
  misc_feature (496)..(496): n is a, c, g, or t
  misc_feature (513)..(515): n is a, c, g, or t
  misc_feature (518)..(518): n is a, c, g, or t
  Coding DNA Sequence Number=SeqID_4815
acggatatgcacatcgctctacatatcacangcgcgngccgtntcaccncncncnctttactatcacaacctcatctcgntgatgacaggtgngggngatgcgtaaggacagtatattacggtatggctcgtaccagaacatatactatcagngaggggnngngcggcccacatctcncactcgcatacncaacgctacactctgctgcgctcttcatctgcgctataatgagctnatgtgngatagcagttatctacttantntgnggcgtctgtacgacgtacagtacacgctgnagatcgcaaganattcnnctactacatattctgcatantctttactatctctggangaggnaggagaccngtgagnctatggatgcattaaactgtggagatattctantatcgcacnnattccctgtacgacntcgatagtaattgntgagatatggtaggagtagcgagctgagttgtcgactcncagtatacacanatcaatgatataaggtnnncgngtgctgtcatgatactcagttctcctatgctctctcatatcgctat

SEQ ID NO: 14595 - DNA, 579 bp, Glycine max
  Coding DNA Sequence Number=SeqID_4816
ttgtcctcagagatcttgtcgttgatatgaccaacttctacacacaatacaagtctattgacccttatcttaagagaaagacccccaaggaagatcccaacatcgaatatctccaaagccccgaagacagaaagaagctcgatggtatgtacgaatgcgtcctttgcgcttgttgctcaacttcttgccccagctactggtggcatcccgataagtacctcggccctgctgtccttatgcaagctatgagatgggtcagtgactctagagatgagtttactcaagaaagaattgaagctttgactgaagatattaagcttgaagattgccaaaacatcggaatgtgcagtgttacttgccctaagggtttggaccccagatctgctcttcaagacttgttgaaacttgccaaggaatataaaaacgagaaaatcgctgctgaagctctttaaagaggtaatgatgatggtgatgagcaagcagaatttactagtagttacataaataaaattaagattgaacacattttggataaatactaacctaatatgtaagaaatctatctcattcatactctat

SEQ ID NO: 14596 - DNA, 467 bp, Glycine max
  misc_feature (210)..(210): n is a, c, g, or t
  misc_feature (272)..(272): n is a, c, g, or t
  misc_feature (400)..(400): n is a, c, g, or t
  Coding DNA Sequence Number=SeqID_4817
agatcgatgtgtcagctcgtcgctatgtcatcgcggtgtgtatgatgggtaatactcggaacatatgttgtcgtcgcggttgatgtctttgtgtgtcgtgtcttcgtcctatgaggtggaagttggactaaatagagagaggttggtccggcgcctacatcccacgaacatacgcgccgtacatttacacacatagtcttcgcactgtcntatacgtggtgaagtatgataaaagagatattgagatcatctccttgtggagagttggagtntagctgtggagataaaatatcctacgacgccctcgacacgacttgtcgtaagctgtacggatgggacgagagtagccacgcacgaatacatcacattttaattggcgcgcggggggggtgggggggtngtgggggcaatattataagcacgcctacaacgtagacaagacatgtctaaatgagcgctgaccgcgc

SEQ ID NO: 14597 - DNA, 401 bp, Glycine max
  Coding DNA Sequence Number=SeqID_4818
atggagggtgatttctcgcgctcgcactcgactcacacacacataatacacacacatcagatacacacacaccaagaaaacaggacagcgcgtccacgatgtccgcgtcacgcccgcggcgcgccgccgcggctcttactcactgctcaactacattacagacagcacgcagagcgtgcggtgcggggccggagaatcagaggagtctcactgtgtgataggaccaacaatacaccacataaaaatccagcggctctccctgcaggtcaggaggtgaggtgggttggtgtgggctggacgtgtcggtaggggctacagacacgacattatatcgataataacgcgcgacgtccaggcgtgccgatgacgacaacacacacagatactacctgcgatcgaaa

SEQ ID NO: 14598 - DNA, 542 bp, Glycine max
  Coding DNA Sequence Number=SeqID_4819
gcgacgacgttcttgaaccattactgcctgttcatattccaaatcctgtgctgcacggccagcagggttttcttcccgtgattacccgcatcatgcacgaagcaattcagctaatgcatgcaaaaaaggacattgggtttaagcctgtacagcttggaacgcgacttaatattttcagcgaagtcctaattgatctggctgaaaaagttttgggagacggcttgagcgtagcacagttccaactgcatattccacatctgatcatttccatcaacatgctactccacgcgcagatggcattctgaggctggtggtggtcgtggtggcggcccacctgttggtggaggacgatgtgggctgagccgctgtctgagtcgaggaaggaacttgctgctgcctttatctttgtcaatggagaatattcttgtgtttatctttgtcaagtagacatgctagttgattttgttagtatccatctttgctaagtcttggtgatccttttggttgtcctgttttaggattcttttccacagtgaccttat

SEQ ID NO: 14599 - DNA, 505 bp, Glycine max
  misc_feature (51)..(51): n is a, c, g, or t
  misc_feature (65)..(65): n is a, c, g, or t
  misc_feature (448)..(448): n is a, c, g, or t
  Coding DNA Sequence Number=SeqID_4820
tccactatactgtatctagggacgtatattatgatacgtcacatcagaatncactatcaatcagntagcgaagacatcctcttctaccaccaatatcgctgacattcgacaaatattgatacgaccgcgttatgaaacgcgagtatacgcattcgctctcttttcgcacacacttcaatatgcaaaatcagtcagtagtacactataattgtgtttatatatgatgtcgtagttaccagctgcgactcatgagagaaggtaatatccatcatgatcgaaacgcgattcccgcgcgcagtgctatttccgggatcgtattctctgcgtacagcgaccgtatatagtattatatcttaatagacgtgacagtctgccatggttctgatttaatatgataagagataaataaagagagagtaccctctctccgtcacgttaacgcgcgcgngtgaggacactcaacaccacctattaataatgacattatccctcatatcatcggcaa

SEQ ID NO: 14600 - DNA, 529 bp, Glycine max
  misc_feature (299)..(299): n is a, c, g, or t
  misc_feature (311)..(311): n is a, c, g, or t
  misc_feature (430)..(430): n is a, c, g, or t
  misc_feature (453)..(453): n is a, c, g, or t
  misc_feature (497)..(497): n is a, c, g, or t
  Coding DNA Sequence Number=SeqID_4821
atatattactgtcttgtgcgcgttggctgttacatactaccattcttacttatctccgcgcgcccctcatatactacaattcacttataacatcatctcatcatcgcgacgtcgcccacgctcctctacggtgagggatgatactgacggatcggcatgtaatagtgatttgaataacgcgtagttttagatagtgggcgtcacgaggtcaagctcacaggttcaatattggtgaggtaatagagttggatgaagtgatgtactagtactcaggcgcaagatgaaatggacgtatgagngactcgggcgcncgatgcaccggcacatgcggcgcgtcggtccagaacggagactgtcatagctcggatatcaactaggtgtattcaatcctgcgacactcatcagatacatccccaatcaaatcatcacnccgcattcatttcatacataagnagaccatacactacgatctcaaatcacccactcagccagaacangcagctctacaacaacggaatgcagtcagctt

SEQ ID NO: 14601 - DNA, 567 bp, Glycine max
  misc_feature (413)..(413): n is a, c, g, or t
  misc_feature (531)..(531): n is a, c, g, or t
  Coding DNA Sequence Number=SeqID_4822
actatcctttgacttctcacttatgtgttgccatctcttatgctttgcttgcgccgatcactgcgctatgacatatcactcgcacgcgtccgtcgcgactgcccctctcattactttctactttgtcactgctcactggtatttgaccactgtacaatgtcttataatcttatcattgtctcactactcatctcaacttcgtgtgtccatcactctcgccatcaactcttcacatatcacgtatctctattacattgcctgtgtgctcggatatgattgctcttgacatctgcactaaacaacactatcatgtgattgattacatagatatttgtcatccttctcattacactgagtcccgtgtgatacgactcgtgtccatgcaccctatctcgcatacactctgtggtgcncacgccattgatcgtacgtgtcaggtatctaactacacttatatatatacaactccttgcatatagttaatctcgactaagcgcctattatacactctcaccgaggagatctgtgcgnacgtgctgccttcagcctctctaagtcggcagtagg

SEQ ID NO: 14602 - DNA, 556 bp, Glycine max
  misc_feature (37)..(37): n is a, c, g, or t
  misc_feature (39)..(39): n is a, c, g, or t
  misc_feature (43)..(43): n is a, c, g, or t
  misc_feature (72)..(72): n is a, c, g, or t
  misc_feature (82)..(82): n is a, c, g, or t
  misc_feature (99)..(99): n is a, c, g, or t
  misc_feature (101)..(101): n is a, c, g, or t
  misc_feature (153)..(154): n is a, c, g, or t
  misc_feature (199)..(199): n is a, c, g, or t
  misc_feature (201)..(201): n is a, c, g, or t
  misc_feature (205)..(205): n is a, c, g, or t
  misc_feature (303)..(303): n is a, c, g, or t
  misc_feature (307)..(307): n is a, c, g, or t
  misc_feature (341)..(341): n is a, c, g, or t
  misc_feature (343)..(343): n is a, c, g, or t
  misc_feature (389)..(389): n is a, c, g, or t
  misc_feature (437)..(437): n is a, c, g, or t
  misc_feature (485)..(485): n is a, c, g, or t
  misc_feature (487)..(487): n is a, c, g, or t
  misc_feature (494)..(494): n is a, c, g, or t
  misc_feature (503)..(503): n is a, c, g, or t
  Coding DNA Sequence Number=SeqID_4823
agatatatacccctcttgtggtagggatagaataaantnaaanacacgaagactcatcgtcccactgcgccnctctcctccngagcaccctaagccccncnaacaacacaaagatcgcagacgaaacagcccaacaacaaacgacttataagnncgatctcttctaatatggacaagtggagagctatctcccctctgncnagcnacgctccaggcctagaactccatctactaaacgatacctattgttgtaggaccctgagggattatcgagatcttcctctagaggcaatggctcactcngggncgacggagtcgggacagctactattctatgcgcnantgccgataactcaggtgagagaatgagctcatgttatgcttgggtnagcacatagcgtgttctggggatcgaggccccgcacagcatataaganatagtcgacttatcgtaatcgaactctgaaggagatcagtaacgcganangccgtcncgttcgganagtattctatgtgcgattgagaggcgatcatctcctaagctcgactagcggta

SEQ ID NO: 14603 - DNA, 573 bp, Glycine max
  Coding DNA Sequence Number=SeqID_4824
ggcttgaggtttagtttagtgtctttgatgaatttgtttattttttgtttggttttgaactagctccgtttgatgttcaatttttttcaagctgttgacatcttggggcaaattgttacttgaacttgaggatactgtcaatgttgatgaacggaaaatgtctgttattttaataaaatgatgagtgagattgagagtttggtttctgaggcttattttatttcataatgtgaaatacactgtattgttttgtgtttttataagctgcaaacacagggctagtttatgttttgtggcacaactaattgtttgttgcagtgagtactcaatgcagctgaatgcttctcggattaaagttcttcaagctcaagatgacgtgatcagttccatgaaagaagctgcatccaaggaacttttgactgtgagtcatcatcatgatgatcatgtgtacagaaaccttctgaaagatctcattgttcaggtcagttgaattttaaatatggtacacccactgtggtttgatagtttgatttttgctgttctgctaactatcattttcagattgttgtttcc

SEQ ID NO: 14604 - DNA, 124 bp, Glycine max
  Coding DNA Sequence Number=SeqID_4825
acccttttgccgaactggccatattagctaaaatgtgccccaccgatcccacttcgccccagctgcgtgccctgaatggccaatgccacttgtaaacgccaacatttcgctaaaaactcggagg

SEQ ID NO: 14605 - DNA, 534 bp, Glycine max
  misc_feature (40)..(40): n is a, c, g, or t
  misc_feature (86)..(86): n is a, c, g, or t
  misc_feature (88)..(88): n is a, c, g, or t
  misc_feature (185)..(185): n is a, c, g, or t
  misc_feature (209)..(209): n is a, c, g, or t
  misc_feature (247)..(247): n is a, c, g, or t
  misc_feature (251)..(252): n is a, c, g, or t
  misc_feature (287)..(287): n is a, c, g, or t
  misc_feature (345)..(345): n is a, c, g, or t
  misc_feature (365)..(365): n is a, c, g, or t
  misc_feature (416)..(416): n is a, c, g, or t
  misc_feature (424)..(424): n is a, c, g, or t
  misc_feature (426)..(426): n is a, c, g, or t
  misc_feature (441)..(441): n is a, c, g, or t
  Coding DNA Sequence Number=SeqID_4826
caccgcgcgagcagttgtggtagacgtgagaaccgacgantacaactgatatgagacgtatcagtcactgtgtttacaatatcgancngtcttcatctctacgtgactcgctcattcgccatcgtgtatatgatgtgtgatgtgcgcgtcgtattctcgttgtcgtggctctatcgtcgcgcccnttgtggctcctctcgtcgcctcgncactgactgcagtgacacgtcacgacgaacaacgccgncccnnccgacatcgaagcgcgcgtcatcgaggagtgtgcncagagtaccacaggagagcgagaggagaagatacgaatacaggttgagacgatgagangtgatcacgctgcgacgcgntcagggagcgacgagcgacgagtatgagtaacgcccgtgcgtggatcgtanatcaatantntgcctcgcgcgcccngcgacgtgcaaccgaaggcgcgcgcagtgttaacacgctcacgtgcgatggccgcacacacgccacacaagcagaggacaaccacgtcggcac

SEQ ID NO: 14606 - DNA, 200 bp, Glycine max
  Coding DNA Sequence Number=SeqID_4827
tgtggctctttctgctgatataggcggctgcactgttgaagacttctgcaaccgtatacacagaatattggtgaaggatgtgaagtatggactgctctggggtactagagcaaggcactacacccagcactgtggacttattcacaatcttcatgacgaggatgctgttcagaatgtgaacaaaaagtgaacgatagcca

SEQ ID NO: 14607 - DNA, 59 bp, Glycine max
  Coding DNA Sequence Number=SeqID_4828
cggcacgaggcaattatatatcgattctcgggccgtgcaaatgttctctgttattgtca

SEQ ID NO: 14608 - DNA, 488 bp, Glycine max
  misc_feature (38)..(38): n is a, c, g, or t
  misc_feature (219)..(219): n is a, c, g, or t
  Coding DNA Sequence Number=SeqID_4829
gggtcgtggcgcatattatatatgatagacagtatganagcagttttgatgatcgcattgtaactgttctgattaatatgtgtcacccgggtatatcaaaggcttgtaatatgaagatgagtaaatggtagataggtattatagttgttgtatgagggaatgataatcttactcatacagtgtcgcaatagtggagatatagcgtaggacgcttggtcnttcatattctggtatgaatcagttcgcgttgctagagggtatatgtgtgtcatggggcatgcgctctataggtgttataagtcagtacatagacaatgctatatctggtattgctggtgtgcgaatagttaactatactacgtctcgcaagtgactattctatgcgcgagtatgtgtctagcttgtcagtatatttcacatctcttctaaccacgctaattgcgaggtgatcagtatgaatcacttgccttgacgtctttcgtagtggg

SEQ ID NO: 14609 - DNA, 305 bp, Glycine max
  Coding DNA Sequence Number=SeqID_4830
tccccggccccattggttataacatcctcctcgagccccccggcagcggctccggtcgacgcccctacaccgtagctgggcggcccccccctttttttttctggaggaaaaaattttttatacatcttcgaaggtcctcgtccatcgattcatgttctgtttgcttgccctttaaagcctttaggtccgacctcggccttttccatcttaaaagtaaaaaattgggttccaggataaatcggaggattttatatgggcttggtggaatattccatccaaccagggccattggttaaggtagtttg

SEQ ID NO: 14610 - DNA, 280 bp, Glycine max
  Coding DNA Sequence Number=SeqID_4831
atatgtatatgtgggcttgggttctgtccactgtatggtatcatggatctgctatgatcagtgcccactgcagcaggattgttcaccttctgctcttatctctgtgccgccaagatcagtttcgcggtctaggtctcccttgtggcaacagtgcctgctgtacagtgtgtagagagcacatacttgtgcatgtggttgtttggatcaacactctgattcttggatcaagtgtgtgtcctgacaatgatgacggaactcgattattcttatgtttcggtaa

SEQ ID NO: 14611 - DNA, 487 bp, Glycine max
  misc_feature (423)..(423): n is a, c, g, or t
  misc_feature (427)..(428): n is a, c, g, or t
  misc_feature (439)..(439): n is a, c, g, or t
  Coding DNA Sequence Number=SeqID_4832
atatgagcgcacactgtcattcacataacacttccaacatatccattccatctccattcacaatctcacgacagactctatactccttacccctcgactctcatctacacctacccatatccacctacactcatactcattaatgtgggcatagctaagcacttgcaatccatacggaccacacactaccggagagaagactagatcgagatagacaccaagcatgtagtcgtttcttacatgtgtgtctccgctactgtaccacttacactctataggtggtcgagctctcatacagtcctcagacacagttcgtcacacaaccgcacacgagacggcaccaagacctctcataaccatccatattgaataaaccggtttctgtagctctgtcacgcagacaatactatcattgacactttnttannatatttaggtnaggtagtgtaggatagggacagaaagtctttcactgtgatctaccgta

SEQ ID NO: 14612 - DNA, 375 bp, Glycine max
  Coding DNA Sequence Number=SeqID_4833
ggccctttcctccagaagggagaatttttgcaggaacgggatcgcctccgaaaacaatgaaaccgtattctctcggggatgccgacaattacctggcgaccgatgggttctaggagcgagggccacgtgtcggtgctgaatcagcgccagagatcgtctagtgtgcagaggacggtgcatgaggtacgatacgcatgtggcggatgtcatcgtggctccgtcgagtcgtgtgaggatgtgcacgtcgatgatctcggagtggagcgtggcgagtctcgacgtgctttcggttttttccgacggtagtgaagtattatcgctattatcagccatcatcatagttaaaagttgtgttccaatttccgtttcttagtg

SEQ ID NO: 14613 - DNA, 417 bp, Glycine max
  Coding DNA Sequence Number=SeqID_4834
caaaatcctcatcacagctcttgtgatggttgtaaccgccgcgatgatgattgaagaagctacgagcattcccatatgtggcgtcaacacaaacgacttgaagaaatgtagtccagctgtcactggaaacaacccaccacctcccactccccaatgctgcaaggtggccaaagccgctaatcttgaatgtctctgcccgtacttcaccaggtccgcgcttgacccggccaaaatcaaggctctagggaccaattgtggcattactaaaaaaccctcctgtttgccatgattgaagaactgagctggaagggacaaatgctggcctgccacaagattaagtctctaagttattatgtcttttgttgttctattcgaataaaccaccagattttgcaattatttttcagtcaccttttt

SEQ ID NO: 14614 - DNA, 543 bp, Glycine max
  Coding DNA Sequence Number=SeqID_4835
agccagcttctgtaatccgcaagaaggcttacaatctttcaaagacgattcctgtcgtactcaaggtcgaattggtccctataggcagtctcttgaatgatttgtttgccaacagaaagccagcgctttcagatgtcgagatgtacattttcccagatgataagaacacaataaggtttaaggaggaacatgcttatctatttgagaccatgaagagacgcaatgctatgatcagaatcaacgtcaaggacaagccgttcctgatattctcttcgaaagtgctggacaagtcctctcaaattatcattgagatgcagaagaaaacaaagaacttcctttggggggtctttctcgtgacgaaaaagtcattagcactcgttcctggaacttctaatcaagctgctcaacgttttgatgctggagatgtggttgacaataccgctaaacgtcagtacaggagggagagagtttgatcgatgcatcttatctcaagaaaattggtaattactaatagctttgtttgctactgtctgaatgtgtgtt

SEQ ID NO: 14615 - DNA, 171 bp, Glycine max
  Coding DNA Sequence Number=SeqID_4836
tattatttggcggtacgtgaaatggtttaatctcattcactggtgctgggagtatttctcaaagattggttgcagaactttacgaaaaagtcaaacagctgagaaattaactgctgttacaagtcaatatgagactacggtactcttcggctgtcacataattaaacaaat

SEQ ID NO: 14616 - DNA, 519 bp, Glycine max
  Coding DNA Sequence Number=SeqID_4837
aattttgtggccctgcctttttgagtttcctggtttataggcctttgggggggaacgattttaactgccagaagtattccattagttctcattttttgcaccaaagagggggccaattaatctggaggcggcggggttcctcccaatttctctttggaggggccaggccacgggtggctaaactccaatttctaaaagggtctcaacctgtgagcaggcctttggaatccaatccttcgatgtcaagattcaggggagtttaggggataattcccaacaattgtcctagaaggatacagtacatatacctagtcgtgtatacctttccaggaggatatgcctttaatcagagctttcagaggatcctcaatgtccgtgatcgacgcatcttgcgtgtgcatacccttagagtcatagtgtgatttcagctctctgggggtaggaagcttcactttcctcggcggtttaggtgcaactttaggtatcgttacatctggcgtttgcatttttcagagtaca

SEQ ID NO: 14617 - DNA, 568 bp, Glycine max
  misc_feature (26)..(26): n is a, c, g, or t
  misc_feature (118)..(118): n is a, c, g, or t
  misc_feature (250)..(250): n is a, c, g, or t
  misc_feature (253)..(253): n is a, c, g, or t
  misc_feature (362)..(362): n is a, c, g, or t
  misc_feature (474)..(474): n is a, c, g, or t
  misc_feature (497)..(497): n is a, c, g, or t
  misc_feature (512)..(512): n is a, c, g, or t
  misc_feature (534)..(534): n is a, c, g, or t
  Coding DNA Sequence Number=SeqID_4838
gacacatttatacattcatccactcntgtatgcccctctctgggacacggacggtcgagcgatctcttatcgcatacgccagattatacgtgcgcagagatctgacaacttaggctancctgtcatagactctcatgtacattcgatgactagactagcgagctgctactacgaatgcagcagccacatcatcttccgatatgcctatgagagatcaatcataaaatctcgtataccatcgcaacgacgntcngtgctctcatacaacacggttcagtaccatcacgtggtgcgaatcacactggttacacgaagttcatagcagatctcatatacagaatgagagactctacaccatgacntgcatgtatctcacatctctacactgatctacgtactaagtagtagtgtttttcgtaatagagttaccgcatcgctcttgatatatcagacacacctgaacttagatctacntctgctatcacacgactctattngcctgtaagatgtcnatcaatgagcagctcaacgtanagatgacatgtagtcagctgtcttctattggatg

SEQ ID NO: 14618 - DNA, 170 bp, Glycine max
  misc_feature (33)..(33): n is a, c, g, or t
  misc_feature (38)..(38): n is a, c, g, or t
  misc_feature (44)..(44): n is a, c, g, or t
  misc_feature (47)..(47): n is a, c, g, or t
  Coding DNA Sequence Number=SeqID_4839
ggtactatgagcttttcaggtatctctattaancctanttatcnatncaccccattttttctatcactctctctgtttctaccctcaatcctaaaatttgttgactccacaacttccttctaagggaggctggaatttattaatttatggccttccaaacaaatttcaac

SEQ ID NO: 14619 - DNA, 578 bp, Glycine max
  misc_feature (227)..(227): n is a, c, g, or t
  misc_feature (386)..(386): n is a, c, g, or t
  misc_feature (483)..(483): n is a, c, g, or t
  misc_feature (507)..(507): n is a, c, g, or t
  misc_feature (532)..(532): n is a, c, g, or t
  misc_feature (537)..(537): n is a, c, g, or t
  Coding DNA Sequence Number=SeqID_4840
gtgcgaccatgtgtcatatcactttcggagtcgacggcaatacatatcattttctcgcctaccgcctgttgatctaatatctataacatatcgccgatgcgccagacgtctgatctggaagacgtcgcgcgctcgcgaacgacgtactgatagtagatccgatgcgcgccgacacatgtgccgccatacgttgtcggttcagagcacgagagcgcggcgacgcgtgngacgtcactatacgtacatgtggctacagcgtcagcgcgataggagaaacaatatgtatagagtattgaatgtgatatgttgtgattatgtaatagtcatgtataggatttgacgcgcgacgagttgcggtacagggctggagttcgctagcgcagctnggtgaagcctccctctcctatctcctcgagcgagtgtggtagcaacgcagcagttctccacattatagcagtgatctgatctaggtctgcgtatatntatgatgtgagaagacgcaaacgngtaataaaggtaagacacgaagcangaaanagatcgaccacctatcatatcactcttacggctacacaggg

SEQ ID NO: 14620 - DNA, 594 bp, Glycine max
  misc_feature (48)..(48): n is a, c, g, or t
  misc_feature (63)..(63): n is a, c, g, or t
  misc_feature (78)..(78): n is a, c, g, or t
  misc_feature (228)..(228): n is a, c, g, or t
  misc_feature (245)..(245): n is a, c, g, or t
  misc_feature (249)..(249): n is a, c, g, or t
  misc_feature (265)..(265): n is a, c, g, or t
  misc_feature (306)..(306): n is a, c, g, or t
  misc_feature (331)..(331): n is a, c, g, or t
  misc_feature (343)..(343): n is a, c, g, or t
  misc_feature (392)..(392): n is a, c, g, or t
  misc_feature (451)..(451): n is a, c, g, or t
  misc_feature (491)..(491): n is a, c, g, or t
  misc_feature (518)..(518): n is a, c, g, or t
  misc_feature (535)..(535): n is a, c, g, or t
  misc_feature (541)..(541): n is a, c, g, or t
  misc_feature (545)..(545): n is a, c, g, or t
  misc_feature (550)..(550): n is a, c, g, or t
  Coding DNA Sequence Number=SeqID_4841
tatccttacgtctctcagctcgtagcgtctcacgcttgttgttccgantgtggtctcttctgncgcggcgcactgganctcgcgcgatgctacgctccatcgtccgctgtagcatcgctgctctcgcacgctagcgacatgtctctcgatcacacttgcgatgctgtccccagctcctctccgctcgctgccctctacgtcctcgcggctcctagactcacggaatcnactctctacgctatacntgcnacatcacattgtaatntatcacactcagccctgtgctcgttcctcgtgtgccgtcgntgtgcatcgatgctctgtctggtancgacgcgcgatnacttaatttctctagcgctactgtcctctctctcgcgcggtgatcgcanctgattcgtgacgtctgagcgacgtgctgtgagtgcgagctccgtgcttgatagcatgntgattcgtcgtccatttgtcgcagtgacgctgactacgangtggtagatatcgacgccgacacgctngcgtgacatgcgagctngtactncctngccgntcgcgcaggtcgctcatgctagcgcttgacgtctcagcacgagc

SEQ ID NO: 14621 - DNA, 590 bp, Glycine max
  misc_feature (481)..(481): n is a, c, g, or t
  Coding DNA Sequence Number=SeqID_4842
tattcatatttggtagctgtgcgatatataattcctcttatatagattcttatcgcttctcatgctagacatctgagttatagtgaaagacacagccaatcaaatgtactaggatggtcgtggtgggtgtgttaaacataaataactcctaaagtgtcggcaatgtaggccgggcggtcagtcataccacgcatggcaaatgctccgtagcgcggggggtcgagtatttgtttgtgagtaggcggtcgcctattatagtcggctgagaaagattacatatgcctccctcgccccgcaccctcagtctaactatcatgagagacacggaacgtctcgcgcgaacagacacatcaaacatttgtaacactctttgattattctggtattagtagtgttgctctctcgcgtctaattcgctctgtatttattcgtgtgttgctattcctatctcttattttactcagacaaaaaatctccctcncccatctcccaccctcatactgtggaaaacaagcgcgcccctccccccgcgctccgcaatctcctaactcatcaaataactcaaatcaatactatatccacctcattcg

SEQ ID NO: 14622 - DNA, 489 bp, Glycine max
  Coding DNA Sequence Number=SeqID_4843
caaaaccgcaatccgcgccgagaaaacagactccgccgccgccgccgccgccccggccgccgccgtgaaagaagaagctccggtgggattcacgccgccgcagctggacccgaacacgccgtctccgatcttcgcgggaagcacgggtggtcttctccgcaaggcccaggtggaggagttctacgtcatcacgtggaactcgccgaaggagcagatcttcgagatgccgacgggaggcgcggcgatcatgagggaaggtccgaacctgctgaagctggcgaggaaggagcagtgcttggcgttggggacgaggctcaggtccaagtacaagattaactaccagttctacagggtgttccctaacggtgaggttcagtatcttcatcctaaagatggggtttatccggagaaggcgaatgcgggaagagaaggtgtcggtcagaacatgagatctattgggaaaaatgttagtcccattgaagttaagtt

SEQ ID NO: 14623 - DNA, 545 bp, Glycine max
  misc_feature (148)..(148): n is a, c, g, or t
  misc_feature (177)..(177): n is a, c, g, or t
  misc_feature (188)..(188): n is a, c, g, or t
  misc_feature (326)..(326): n is a, c, g, or t
  misc_feature (328)..(328): n is a, c, g, or t
  misc_feature (337)..(337): n is a, c, g, or t
  misc_feature (363)..(363): n is a, c, g, or t
  misc_feature (394)..(394): n is a, c, g, or t
  misc_feature (437)..(437): n is a, c, g, or t
  misc_feature (520)..(520): n is a, c, g, or t
  Coding DNA Sequence Number=SeqID_4844
tgactgcactacataacggatacgtgtgagcgtctcgacggacgtagtctcagtatgagtcatatcaccgcacttagtactgatctgcaccacaaccgtgagtatcgcgcgatgactatattcgcactacgtacataacctggcgacnatagcgcgtgatgcgtcgatgactcaacnggagtttgctncacgttaccagcgtcgcatctacgtctatgtgcacggctgaagcgcgacttgctgacatgagattatcacatactactctatcgctatccatatatatcgagtcatatacatctcacaacgtacgccatctcgcgacncnactgtgaanagttacacttgacgatggacagagangtaacgctcatatgtatatatgttatatctntcagcacagcagcagaggtgaacgacgtctgtatgatacgatntgatatgtaatagacaccttcgtttgcgacgacgcacgctgcgtctaccgtctccgatgacgtcgtacagctgtatcatgagngacactcgctatgatactgctatct

SEQ ID NO: 14624 - DNA, 378 bp, Glycine max
  Coding DNA Sequence Number=SeqID_4845
gcgaccagaggcacaccggccatggcggtgcagcagctccgttcgtcggagcagcgtgcctggcctcaaggccgcgcgctccttcgccgaacggcgctcgccgtgtcgagcacatggcgagattgtgagccgatccccgccagcgatgcgcacaacgcgctggacggcgaggcggggaggcgagcgccggcgaccgcgacatcaggagacaacggcaacgtgcgcggcgactgccacgcaacgtgcgtccataagggaggcgccgacgggtgcttttgtgcgtcgtctcgagggacggcggtgtcccgcccatggcgtactcgcacggcggcggccgtgcggacccgcaggccggcgtcatcaacataaggcccagcc

SEQ ID NO: 14625 - DNA, 483 bp, Glycine max
  misc_feature (26)..(26): n is a, c, g, or t
  misc_feature (83)..(84): n is a, c, g, or t
  misc_feature (89)..(89): n is a, c, g, or t
  misc_feature (132)..(132): n is a, c, g, or t
  misc_feature (138)..(138): n is a, c, g, or t
  misc_feature (207)..(207): n is a, c, g, or t
  misc_feature (235)..(235): n is a, c, g, or t
  misc_feature (258)..(258): n is a, c, g, or t
  misc_feature (281)..(281): n is a, c, g, or t
  misc_feature (332)..(332): n is a, c, g, or t
  misc_feature (355)..(355): n is a, c, g, or t
  misc_feature (402)..(402): n is a, c, g, or t
  Coding DNA Sequence Number=SeqID_4846
gtagttatggtgagcgtgtcgtatcnttgactgtgctcatctatccaacactctagcgcagaccgccgctagccccacccgcnngcgancccctcccacgaaacgatgtgaggagaatatatacacacaacnagctantgagtacatactagcgagtgatggaggggagatggacgatgcagcaccatctataccactacattatcntctgctatcacagtctcactacatattnttcatatgtagactgtacgcgtnacagcgtcgtgttgtgtgcttcnactatatagaggatgtgagacagagcacaggagcgacgtcgcgcggcgtcngcgcgtctgcagccgcccgagcnggcggcgggcgcgggcgagcagcgctgcataccacataatctatacnactctctagtgtgaggcgaagaagagatagagaatactacggaggacagtcatcgatacctcatacacatatcggatacat

SEQ ID NO: 14626 - DNA, 484 bp, Glycine max
  Coding DNA Sequence Number=SeqID_4847
gcaaagtcttgtttcatgcaacacatcaatctgattccttcagcaaacttattttcatcactaaacgtatgtttgtgtggatgttttcaaactattctccattttaccaatacacaaaacgcttaaagattttgttatttttgcgttttatgcattggaaagagagaaattttgttgcaaagtctacacaaacatacgttaaagccgtgtttcacgcaacacacatcaatctaatggctctaaacggtatttccacaccaaggttatacaaaaccatttgcaactacaattgagttcacaacatagtttctggggttgtattagtttgcatgcaatttttcataaagtcaaaggttacaataaaattattatgagtaattatattcatctggattgagagtagaaagaagtgtgtgataagaagaaaagaaaagaaaaaggtaaagagaaaaaaatataaatgtaatatatgacgtcaacggaa

SEQ ID NO: 14627 - DNA, 513 bp, Glycine max
  misc_feature (411)..(411): n is a, c, g, or t
  misc_feature (467)..(467): n is a, c, g, or t
  misc_feature (477)..(477): n is a, c, g, or t
  misc_feature (481)..(481): n is a, c, g, or t
  misc_feature (485)..(485): n is a, c, g, or t
  Coding DNA Sequence Number=SeqID_4848
actaccataaccaaacaactctacatcatctttatttagtctttgcaccaagactactttgcgcaacaccaaaacacatccacttaacacactccactacacaaatcatccaaaatgggcggtgttgtctcttgcatcaagtcttgtctccagaccatcggagatgccatcatggccgttatcggcggtgtcggccgcatcctccaggccatcatcggcgccattgtcaagttttgcggcatcatcgtcagcttcctcacctgtggctactgcggcagcaagggcggacgcaccaagcgacgcggtcactcgcacatgaagtcgacgagagtatagaggagaagaatctctcttcttgcacagaaataagaacgtttgaagtgataccaatttgagaaaaggagacggtanaagaggggatgatgatacacctggtggaagaaggagtttgcgactaccataacggncttttttttnttgnctgnatagcattaggatcccaatcctcgattt

SEQ ID NO: 14628 - DNA, 102 bp, Glycine max
  misc_feature (57)..(57): n is a, c, g, or t
  misc_feature (74)..(74): n is a, c, g, or t
  Coding DNA Sequence Number=SeqID_4849
aatgggtgcactacaagtatgagtcggagctatggggcaagaagcgagtcatgatgntatgagatccttgcagngggaagaggagctgggagcaccgccagc

SEQ ID NO: 14629 - DNA, 133 bp, Glycine max
  Coding DNA Sequence Number=SeqID_4850
atctcctcgcttcgacttttcttagggttttcgcgtgttcaatcgatggctaccctcgatagcgacgtaaacatgatccctgctggagaatcctcgagctccgtcgtggcttcttcgtcgagcaagaaggcga

SEQ ID NO: 14630 - DNA, 98 bp, Glycine max
  Coding DNA Sequence Number=SeqID_4851
tggagctcctgtaatcgaatagtgaattttgatcccttgaaggtgtgcattataaattgtgaaaatgccacaggctacccggtattgaaaatttagca

SEQ ID NO: 14631 - DNA, 512 bp, Glycine max
  misc_feature (377)..(377): n is a, c, g, or t
  Coding DNA Sequence Number=SeqID_4852
tggcggtcgactagaatcggagaattgacccgcacgtcacaacgtcccatgagaatcgtctcagcactcgcgtacacggtaatctcgtattcgattgggtgggggaggtggtcgctaccgtattctcccgtccgctgctcctcggactttgggggtcgtgttgagcgtttggtagggtggagggggcggcgtatggtcgtatatagccgctgtaaatactataaatctctatagacggtggggaggagaggagggaggaaaatgtctgaatagtcactagcggcgcccgtcagcacgtgctagaaaaaataagggagaagcggagaaagataaataaagcacgtagcgcgttctagagtagaaaattaataatacangagaagggagggggatacacacacgcaaaggaaaaatccactaggaggaaagaggtggaagagactgacacctctatctccgtagccaatgtccgtgctggaaatatctgcacgggtaaagaggatcgcgccgcc

SEQ ID NO: 14632 - DNA, 167 bp, Glycine max
  misc_feature (102)..(102): n is a, c, g, or t
  Coding DNA Sequence Number=SeqID_4853
gtttctattttcattcttacttagcttattgttaattgtatcattttgttgatgttgtttaaatcaggaatagttttgtttgcttttgaaattttttcgtanacatttcatttatgtactgtacttggctggctgttgcttttcctgcatttaaaaattctgctttt

SEQ ID NO: 14633 - DNA, 563 bp, Glycine max
  misc_feature (172)..(172): n is a, c, g, or t
  misc_feature (213)..(213): n is a, c, g, or t
  misc_feature (403)..(403): n is a, c, g, or t
  misc_feature (460)..(460): n is a, c, g, or t
  misc_feature (505)..(507): n is a, c, g, or t
  Coding DNA Sequence Number=SeqID_4854
aaacctgggcattctcaggaccgagaacacacgacagccaaaggagaaggggagccacggacgagaacggtgtgatggcgacgtgacaggagtagttcgggcgtgtcactatgcagcgtgtggattgtaaatgtagatcacactgagggggcacaaactacgcccgacacanaataacacacccgcaatgctcaggactgcgcgccaccaccntccccaccacatcctagcgtgccattagcgggagtgttatacgtgggttgggcgttatggtggtgcggggatacggggcacgggggaaagtagggggtgggcgtgatccatcgatctagcgagcgtcccattgttacgactcatgacgaggtgttgctcgtcgtagcgttgtctttcttctctatcgttncacccacccaccacaacagcaactataataaaaccgacgcaacatttgatgtctctntttctccgcccgcgtttatgagcgagtataatacaggtgtttttnnntaacagacaacatcagtgtgccgctacacgctccgcgccggattcgtagggccaca

SEQ ID NO: 14634 - DNA, 586 bp, Glycine max
  misc_feature (71)..(71): n is a, c, g, or t
  misc_feature (152)..(152): n is a, c, g, or t
  misc_feature (167)..(167): n is a, c, g, or t
  misc_feature (199)..(199): n is a, c, g, or t
  misc_feature (212)..(212): n is a, c, g, or t
  misc_feature (307)..(307): n is a, c, g, or t
  misc_feature (357)..(357): n is a, c, g, or t
  misc_feature (359)..(359): n is a, c, g, or t
  misc_feature (385)..(385): n is a, c, g, or t
  misc_feature (440)..(440): n is a, c, g, or t
  misc_feature (495)..(495): n is a, c, g, or t
  misc_feature (507)..(507): n is a, c, g, or t
  Coding DNA Sequence Number=SeqID_4855
tgaagacacttcgtactgtgcgcgtctgtcgcactccggagtcgagactgcgccgcgtgcgagctgggctncgacgtacgcgacgggctctattgactcgtgctagtcgtgccatctacacgctctgtcatctgctgcgactatccgtgcgngtgctactgtatctnacttcgctctcgcctatacgtatcgtatgtcntaacgtgttgagntgagagctgagagtgacggcatacacgacctgctcgctgacgtgcgcaggtcgtctgagcgcctatgacgtgacgcagcggagaccgctagcatncgatcgcacgtgtcatgacgcgagcatgtcgccatgaccgtactgtagangncgtgcgacaagctctgctaggttganagagatagctgtgatataaactagtattacgactgatgacgcgagcgttccaganagactgatcagtaactcgatacatacaagatctctgagtcgcgcgacagactgcnatcgataactgnccacagtctgcgcgacgaccacgtacatgaatgttgtgctacgctcgctcacgatcagacaatggcagcacagcgcact

SEQ ID NO: 14635 - DNA, 532 bp, Glycine max
  Coding DNA Sequence Number=SeqID_4856
tcttgccttggcaagtctggactttgggagtccttattgctggtaccatttccgcttttgtcgtcacagctagtcaccaagctgagcacaaatacgaaggaaagaaggaattcgaaggagaagcagcaaatgttcgtagatccaaataccaaatccacgactatttcacccatcaagtcgtcaccaccagaaacatcgacctccacaactggttccttaattacatctgcggaggtatgcaataccaaatcgaacaccacgtcttccccagaatccctctttataaacttcctcttgtcaagggtgttgttcaagaatattgccaaaagcatggtgtagaatatagagatgaaggtttcatggatatcatgatgagaaactattatcacattgaaacaatcgctaaggtcaaagcccaagcctaaggttacaaagtataagaagaatttaataaattcatattttcttatatatgcttgcttgttctttctttatataatgcgtgaataaatttgcctatcccatttgttgg

SEQ ID NO: 14636 - DNA, 400 bp, Glycine max
  misc_feature (227)..(227): n is a, c, g, or t
  misc_feature (287)..(287): n is a, c, g, or t
  Coding DNA Sequence Number=SeqID_4857
acgccgtgggcgtatgacagtccaatggaggtgaatatagcacacactattgcgcgagcgtgtgtgcggcgtcgtggcgcggactaatacacggatagatatgagtagcggggcgacgagctcgcagtaaaataacagcaaagacagaggtggcgtaaccacgcaatacatacatagcaggcggagcacactgtcaagcatgcacagcctggttccctatcaatagnagaccgctctatattatgacgtgccagcagtacagacagagccaaacctatatatactanctattgatgcgccgtatcgactacttagtgactacgtgcaatttatctactagacgcagtcgtatcgtctactatctacgcgctaggctcatcagccgctgcgatgtgagggc

SEQ ID NO: 14637 - DNA, 506 bp, Glycine max
  misc_feature (481)..(481): n is a, c, g, or t
  Coding DNA Sequence Number=SeqID_4858
aacagagaggctagcgcggacacacgtcgcgaaaggggtcgaagcataggaatagggcgagggacggcggcgtgtgaggcgttgcatcgtggaccagagtgagcagtaaagggatggccgatgtcgacagtagtggctggacgaggcacggcgctgctattctcgggaggcgtagaagagagagacgactcggatgagccctacacaccgcggacgcgcaacgatacgacgacgcgaagccagagccgcgcctcggtagggtgaatgtcatagtggatccttcttggcctagtgcatagacgggggtggccatgagagcgatgaggatagagagatgcatgatatacgaacgctgtcttctttctggatctgagtggatggttacatacgtctatagtggtaactacgctatagaaagttatcctccccagtccagcgaggaggtattagcacctagtttgcttagagcccgctcccttcncagcacgacgtggtgaggcttgaca

SEQ ID NO: 14638 - DNA, 143 bp, Glycine max
  misc_feature (28)..(53): n is a, c, g, or t
  Coding DNA Sequence Number=SeqID_4859
tggtcagatactcagattgtgctgtctnnnnnnnnnnnnnnnnnnnnnnnnnnacggtgaaacagaattggtaacatcatcaaaacgccctgttccgttgacttggcatttctctctgaagaatttcttatcaccacttctta

SEQ ID NO: 14639 - DNA, 321 bp, Glycine max
  misc_feature (142)..(142): n is a, c, g, or t
  misc_feature (200)..(200): n is a, c, g, or t
  misc_feature (217)..(217): n is a, c, g, or t
  misc_feature (224)..(226): n is a, c, g, or t
  misc_feature (236)..(236): n is a, c, g, or t
  misc_feature (242)..(243): n is a, c, g, or t
  misc_feature (251)..(251): n is a, c, g, or t
  misc_feature (279)..(279): n is a, c, g, or t
  Coding DNA Sequence Number=SeqID_4860
ttcttgatctcctcgcgccgcaagagcgcatctcacacattactcgctcacctcgcccggctgtcgcgccttgtgttcttcttattccaaatttatgcgcggtggctcgcttgccgacacgcggcggcacggcgcgcttctntgctctcgctcaggcgtggcgaaatgataataaaataatatccttcactctatctctnctctcgctactctgctnccatctnnnctctccactntcgcgnnctctcggngcgcgctcctttcgttctcgcggggtcncgcttgcgtttctttatagcggcggagcaaagacttacgaca

SEQ ID NO: 14640 - DNA, 462 bp, Glycine max
  Coding DNA Sequence Number=SeqID_4861
gagcacgaccgggttcaaggccgatctcagcgcttttcagagccgcgccgtcacgggccccggctatgcctcgcgcgtatacgcgaccgacaacacggtgggttgggatcatggcgtcggcgccatcgagcagaccggcaatccgctcgacttggccattcacggggatggcttcattgccgtgcaggatgtgacgggcaacgaagcctacacacgggcgggcgatctgcacgtggatcccaacggtcagttgctgacagcgaccgggttgccggtgatgggtgacaacggcccgatcagcgtcccgccgcacagctcgatcagcgtcggccgcgacggaacgatgtcgatcgttccactcggacaaacgcccaacaccatttcgacggtggcgcgtgtcaagttggtcaacccggcgctggattcgatccagcgcggcaatgacggcttgttccgcgcgaa

SEQ ID NO: 14641 - DNA, 544 bp, Glycine max
  Coding DNA Sequence Number=SeqID_4862
ccccgaatccgacagaaaagcttatgctgaggaaactattgctaacgttaaaaaacaaagacaagttattgagaatttgaagaacgaaaatatggctttaagagaaacaattgctcgaattaacgatcagcaaactcaactgactcaaaatcttgctgcaaagaatgcaagttttgacacaatgagagcagaatacgaaatgtcaattgaaaatgaacaaatgaagatcagagaatatgacagaaatattgaagcttttcgtgacagaatcaagagccaaaagaaggatttaggtggtgtaaatgctggttctgaaaatcaaaatgctcttggcaaacagatcaaaattttagaaaatagacttgataaagcaaaccaaaagtttaatgaagcgattgctaccaacaagagtttgagacaaaatattgacagtttaagacgtgaaagagttatattcgataatctttataagaagttggaaaaggaacttcatgaaaagagaaagaatatggccagcattattgaaagtgccaacagtgcttat

SEQ ID NO: 14642 - DNA, 568 bp, Glycine max
  misc_feature (39)..(39): n is a, c, g, or t
  misc_feature (334)..(334): n is a, c, g, or t
  misc_feature (418)..(418): n is a, c, g, or t
  misc_feature (527)..(527): n is a, c, g, or t
  Coding DNA Sequence Number=SeqID_4863
agagcgcgagttctgagagtcacaagagtatagtgatancaagagcgcgattcggtgcggctcctgctcgacaaggggaagtatatactataaagagaacagaatacatgtacagaatggcaccagcaggcggaggcacgattcgggagataagtatcgcttgcactcgcacagtttgttataatcgcgcagagaggctcgtgatcgaagtccacagcgacgaggtgaagtaggggcaacatataacataagaaatcacacgacagaagtagtactctatatctttgaggtcttatcgctagtagaggtgtaaggagtatatttaatttatttntttatgtatttatgatgagcctgttccgttggttggtaagagatcgatgtgctttgtttttgcacaacaaactaaaaagtaagnaataatgcttatatatgggttttggagttcgttttgttatcatagtgtttggtggtttacacataatgtatgttatacagagttgaggaaggggcacctgcacgcggcnaagtcgagagcttgtgttgtgtggttattgctgtgggttat

SEQ ID NO: 14643 - DNA, 547 bp, Glycine max
  misc_feature (179)..(179): n is a, c, g, or t
  misc_feature (235)..(235): n is a, c, g, or t
  misc_feature (274)..(274): n is a, c, g, or t
  misc_feature (341)..(341): n is a, c, g, or t
  misc_feature (376)..(376): n is a, c, g, or t
  misc_feature (404)..(404): n is a, c, g, or t
  misc_feature (443)..(443): n is a, c, g, or t
  misc_feature (477)..(477): n is a, c, g, or t
  Coding DNA Sequence Number=SeqID_4864
gtgtacctacacttagagtgcgcatacatgatattgtgatcattgagcatacggctagatgtacgtggacactcagccacccgtctagtatactatggtgtgcatgcgacagcacggtgattgaatcacagtccgcctactatgctaattctgtcattcatagctctatgattgcaagntgctctcgtactgttcgtgtccgtaatatgcgtgatctattcattatcatcttgcngacacgtgtcttgtcgcgttgactacgctattattccgntgctactaatcgctcgcgactcactcgttctctctcatctaccacatatctagactataatactatnatagtactagctctgatcgatcatacactcgactnactctgctcgtcgtgactatcgcagtcncacatctatgtagactcattacttctcgcctcccagcgnatgatgatgtacgtactgtctcactctctctgtntgcgcctacgcgtatctctgcctctcatactgattcgcatgatcagatgcgcgcttctgtaactagatcg

SEQ ID NO: 14644 - DNA, 257 bp, Glycine max
  Coding DNA Sequence Number=SeqID_4865
gtataacagagacctccacaggcttggataatatctttcgttcattgaggagcggacgtcatgggcaccgcttgaacttgaggagtgataatagccagcaaatccgtgggtcaaatactgctgttgtaccacaaggccttgaggagttgcttgtcactcaattaaggcgacctactgctgaaaagtcatccaatcagaacatagcagaagcaggttctcatgttgagatgcaatttgaacatactgatggagctgtg

SEQ ID NO: 14645 - DNA, 498 bp, Glycine max
  misc_feature (203)..(203): n is a, c, g, or t
  misc_feature (463)..(463): n is a, c, g, or t
  Coding DNA Sequence Number=SeqID_4866
agatgataacgtcatagccctctcgtatcatagtgtggaatacgtccgcagattagtacgtcattctgacggaaagatgatcgttatactatcacatctcgtctacatgctgcgcgcgtgcgtcatcatatctacatccacttagcatagaactgggatcgcagctgtgtattcatcacgttacacatacatatagtagccancgctctcctcagcatcacacgattgtgtgtttgcgtcacactcgcgagccgttgaatagacatctatactacacaccgcttatgatgtactcatcgcggcagcgatccccctgcacttgctgagttgcgatttaagcgtgtactagtccgatcgtcgtagtcgtaagatatctcagtcgaccacgtatatcgcatctaccctctatcgctgctctcgctgtgcagactggtatctaagtactgtcaatatctatactgtnctgcagatgcgatcgcgtgatgcaatcgctgcgta

SEQ ID NO: 14646 - DNA, 501 bp, Glycine max
  Coding DNA Sequence Number=SeqID_4867
tactcgttgagtttatatttcccaccctctgatctcccccgaggcgcgagcaggaagacgccggcgggcggctccggcgaccggagaatctgcggccttcctccccggcctttgcataagattgctgccagagtgaaactagtctgttggtggaaatggccagtacagcatgcttcgtgattgtaagtaagaacgacatcccaatctatgaggcagaagttggatctgcacccaaaaaagaagatctggcttatcaccatcagttcatcctgcatgctgcgctagatgctgtttcgggactaacatggaacacacccgccatgttcctgagcgcggctgacagatttactgacccttgcgacgtctggttacgcaacccgccggcgatattagaatcgtggtggttcccccacccccccagccggggcgggaactaaaacgctttttttcaacaaggcccttgaaattttacatgcaggaaatttcctcaatccccgctgg

SEQ ID NO: 14647 - DNA, 552 bp, Glycine max
  misc_feature (144)..(144): n is a, c, g, or t
  misc_feature (240)..(240): n is a, c, g, or t
  Coding DNA Sequence Number=SeqID_4868
tacacactcgtgaaatgcagcgcggaactaaagtagcagatcactgcgtccgatacacagtgatgatgcagagatgcgcgtagtcacacgattacgggagcacgcgcgaacgtcacgccgtccatccactcaccgccctccacnacgtcacagaatcaaatcgtagactcacacaagtgactgtcagaaagagaacacacacgcacgcgacaacaacacatcacctcacgcgagctgggngcgccccgcactcgctcctgagtgtcatgtttgagagatgttagtagctgacgtgagataggacagtcgtacggccgcgccggatccccgaacctggcaaggatttatactcgagatggtgtatcgtgactcgatagtcatattctatcttattaagcagctaccctctctatctcctgctctgctctctgtcggctctcgatgtaaggtcgcagagataatcctatcactacatttgtatgaacgcgcactacagaacgatatatgttgtactagttacaacacacatatgaccgtaatagctgggcgtgc

SEQ ID NO: 14648 - DNA, 563 bp, Glycine max
  Coding DNA Sequence Number=SeqID_4869
gaacgttttgacgagagctgcggatgttgaagttgctgccactactcaagttgaagctcctgcggcgaataccgaagctgcgagtacagagttacctgatatcgtcaagaccgttcaagaagcttgggacaaggtggaggataagtatgcagttagttctctggcagtttctggttttgtggctctttggggaactgctggtgtgatctcggctattgacaggcttccgttggttcctggtgttcttgaagttgttggtattggttacacaggggtggtttgcttacaagaacctggtcttcaagccagacagggagtctttgtttcagaaggtgaaagacacatacagagacataattgggagcaactgaaccagaggatgatgaagaagaagaagagccttttagagggggccattcatgactttcgaatgaatctaacacagcccacatctttctttcaagcttcccttgttgtaactaaataattttcgtcctctctctctctgcctcgggtctttttagctcaaaatataccatatccatccatttatgtcagtgttg

SEQ ID NO: 14649 - DNA, 583 bp, Glycine max
  misc_feature (199)..(199): n is a, c, g, or t
  misc_feature (432)..(432): n is a, c, g, or t
  misc_feature (443)..(443): n is a, c, g, or t
  misc_feature (546)..(546): n is a, c, g, or t
  Coding DNA Sequence Number=SeqID_4870
gatgcaactgcgtgtattcgtaccaaaacgctcggtgggtgttggataatattcccgcatgtatgtgcgtgcagcgccacattagttgatgagctactccactacccgtttcatatctacctcacgcatattgttgggacgtcgcgcggtagatattgcacaaattaaataataccgccgctcgccacatacataacancggctcggtccgcgcgcgacacaatagatagcgtgacaatatatcgtccgacatcgcgcgccgcggccgcaagaatcacaaggcacataaatgatggtgtgtaatacaatacagcactgtcgcggacacgcggacgagagacgacacgaatatatacacggcgccgacgcgcgcgctgcggcgataagcggacatacagacatgaatgacgtaggtgcactctcgtcgccgangcgaccgccgnataatatacatagtaccgcgcataaactcgctagcggccgcgcggcgcgcggagaaattgatgatgtgtgacagagctgcaagcgcgccgtgcgcccgagcangcaaatgtcagtgatacactatcgtcgatatcgccca

SEQ ID NO: 14650 - DNA, 347 bp, Glycine max
  Coding DNA Sequence Number=SeqID_4871
ttctctttgatctccagtgtcgcgtgtaatttgttctgcacttgcggtgtaatttgttcatcaaggaattcatcgtctccatcttgtccaaattcatgttatagaacaggtttgtgtcccagggattggattctcctcccccatcttcgcttgctggtatttcctgatgcaattctgcctccagtgtctactaagaaactccttcagttttttgttcttgcaagaggtgaagagagatgatggatgagggagttggtgttcgactgtttttgctgtgtggtccctgaatcaggagggggtttgtttgtccaggacgaaccgggtgggatgtttatccgacctgttta

SEQ ID NO: 14651 - DNA, 204 bp, Glycine max
  Coding DNA Sequence Number=SeqID_4872
tttctgtctacaaccaaaccacatccaaagtttatgacacacttaaaatagcaaaacaaaaaagaaaccttcctatatatagctaccataaccctaaattctttatccaatccattcaaaagccaaagatcataataatacttatcaatagctatacacctattaaccaaaccatcaagaccctctcatcacacttagaaacaa

SEQ ID NO: 14652 - DNA, 518 bp, Glycine max
  misc_feature (28)..(28): n is a, c, g, or t
  misc_feature (148)..(148): n is a, c, g, or t
  misc_feature (171)..(171): n is a, c, g, or t
  misc_feature (228)..(228): n is a, c, g, or t
  misc_feature (276)..(276): n is a, c, g, or t
  misc_feature (310)..(310): n is a, c, g, or t
  misc_feature (340)..(340): n is a, c, g, or t
  misc_feature (365)..(365): n is a, c, g, or t
  misc_feature (381)..(381): n is a, c, g, or t
  misc_feature (449)..(449): n is a, c, g, or t
  Coding DNA Sequence Number=SeqID_4873
gtacgcgagcctatcggcgagtatgcancatcagagatagacgcgtagcatgcgttcaactacaactcagcgcgagcacatcatgctgtcatagcagcacagtagtagcgtcctagtgcgacgttagcattagcgtcagcatcagacntagataactatcgtagtgtcgancagctctgatgtcgtgaagagcgactatcagatgatcatagatgatagtaatgagantgcgcagcgtgcgcagtcatgagcatcatctcgtgcatacgtagcgcncggctcgagagctgcgacgagtctcatagatatnacactagagtatcagaggaaggatgctgtngaggtgtatatgtgagagtgtgtgngcgaacgttggtatantagtactatgatagacgactgtgtatctctctagtgtgagagagatgtagaagctagtccgcagagangggaggagagagcaaggtgcggcgagactctgacattagagtatacgtgtgtagaaacgagcagtgcat

SEQ ID NO: 14653 - DNA, 501 bp, Glycine max
  Coding DNA Sequence Number=SeqID_4874
attttatgagtacacggcgctccacgagaaatgtgtgtggtgggtctctggcggaaaaacaaatattgggaacagagaaagaaaaacagtgtaccccctcttgcgagcgtctcactttcccagagaagattttaccccttgtgtgtgacccgcgcagaaaaatattctcgacacaaactgtgccccccgaggtgagtgactgtgacaaaaatcacgggtgtaaataaaaaaataaaaactcctcttcatatcaaacccccaaatactcgagaaaccccttctctttgcgcgagatatacctgtgacatgagcccccccctcttcctggggactcgccaccattttatttgcgagaaaaccccttgtgtataaagcgccccctcccccaaaaatagtgggagacctcactgtggaagaagaagagtggacaccctccctgtgtcacaaaatctcctacgcggagtgtttctcttgtgagtatgtgtgtgacaccccgagaga

SEQ ID NO: 14654 - DNA, 558 bp, Glycine max
  misc_feature (86)..(86): n is a, c, g, or t
  misc_feature (149)..(149): n is a, c, g, or t
  misc_feature (237)..(237): n is a, c, g, or t
  misc_feature (271)..(271): n is a, c, g, or t
  misc_feature (293)..(293): n is a, c, g, or t
  misc_feature (326)..(326): n is a, c, g, or t
  misc_feature (346)..(346): n is a, c, g, or t
  misc_feature (405)..(405): n is a, c, g, or t
  misc_feature (409)..(409): n is a, c, g, or t
  misc_feature (445)..(445): n is a, c, g, or t
  misc_feature (448)..(448): n is a, c, g, or t
  misc_feature (466)..(466): n is a, c, g, or t
  misc_feature (469)..(469): n is a, c, g, or t
  misc_feature (503)..(503): n is a, c, g, or t
  misc_feature (510)..(510): n is a, c, g, or t
  Coding DNA Sequence Number=SeqID_4875
atacgcccactatcgtctacacatatcatcctcgtacaactccacattgtgctctacatgacgtcacaaggtgtagtacaaatctngaagcgagtaaatatactagatgtataaaataagagatgcaacatacccggtgttatgaagancgcgcagatatttagcatcgtgcgtgaaacgaagttcgttgcgacgagctaagtgctatgtagtgcgcagcacactatctacactaancgtaccacgtctgatcatacgtacaccagtcgantatacgtagagagagtagcatntctctagcgtctccgctcgctcatgcatgaccnctctcagtactctgacctancactcacgatgacattctgcatgtctggatcatcgtgtcactatatctatatcaacatnacgngtgagcactgcatcacttccagtatacatatgcatncanaagcagacagtgactatntgnaatagcatgtgttacgagacgagactgcgtcgcntgcgagncgatggctatgctgccagcgctgtgcgatatcgcttgcgcgcgacgta

SEQ ID NO: 14655 - DNA, 599 bp, Glycine max
  misc_feature (28)..(28): n is a, c, g, or t
  misc_feature (30)..(30): n is a, c, g, or t
  misc_feature (105)..(105): n is a, c, g, or t
  misc_feature (112)..(112): n is a, c, g, or t
  misc_feature (172)..(172): n is a, c, g, or t
  misc_feature (204)..(204): n is a, c, g, or t
  misc_feature (303)..(303): n is a, c, g, or t
  misc_feature (368)..(368): n is a, c, g, or t
  misc_feature (370)..(370): n is a, c, g, or t
  misc_feature (456)..(456): n is a, c, g, or t
  misc_feature (460)..(460): n is a, c, g, or t
  misc_feature (478)..(479): n is a, c, g, or t
  misc_feature (514)..(514): n is a, c, g, or t
  misc_feature (530)..(530): n is a, c, g, or t
  misc_feature (574)..(574): n is a, c, g, or t
  Coding DNA Sequence Number=SeqID_4876
ataccatggatactacgatcgaacgacnantgcctacttcttcgatgactactgcagcgtctgatacgctgctcagtcatacactcattgtcctagcactcgcgntgaatgntgtagactatgtgcgtagacgcgcgacgctcgtcctcgtcagatgcttacctctacatgntctcgcgtcatcgcagtcgcacgcgcacgtgntgagtatgcatgtcttatgatgactgcattcagtgaaatcgacatctgcgttacatatacatattcagtcctatatgtatagatgagtgagtacgctgngtgcacgcgtctgcactgtgccacgctgactgaacactgtctatggtcgacacgtgatgatggtngnatctacatggcgagcttgcgtcgtgtgtagtcgctagcagataccgaagtcgactgcagcgacgtagctgaacatcggcagccacngatnagcatacgagctgctgtnntgctgcgactcacccgctatgtgctgtctccgtcngccgtcggctgtatgntagtcgtctatgtactcagctcataagtacgagtactcagacgnacgagacctaagtcactcatgtcag

SEQ ID NO: 14656 - DNA, 429 bp, Glycine max
  misc_feature (94)..(96): n is a, c, g, or t
  Coding DNA Sequence Number=SeqID_4877
tccttgtttgttcatcgtcttctcactcaagatctaaccggagaacgaagactccgccgaatcgaagttcttccacttcatcctcaacaaaaannngtcttcctcgaggaatctacccaaggagaatccactttctcgtccgagcgtagtggccaagactcgagccccactcggcgacgtcgtgaaccgccgtaatcctctcggagacatcacgaatcagaagaccggatctagaatctccgctccgtcttctactctcgtgcattgttcgaataagatcgggaaatcaaagaaggcaccgaaacctcccaaatcgaacgtgctcgttccttacgaagacatcgaatcatccttcgttgcagagtcagatttgggaaatgatgatgatgatgaggttgatgatattgacagtaacctcgtggatccgca

SEQ ID NO: 14657 - DNA, 443 bp, Glycine max
  misc_feature (406)..(406): n is a, c, g, or t
  misc_feature (418)..(418): n is a, c, g, or t
  Coding DNA Sequence Number=SeqID_4878
tagtgtagctagttcatgccttagagatagatctagccaagaaacattcaagtgtgaagtgaaatctatctttctaggtcaaacgctaatgtttatataggactatacaataactgatcaatccgatattctcacaagagtatatcacaatattctattcgttgcccaaagacccttggacatgtatcaagagtgattaaagttgcttaacgactaagcaacacaaaaagtaggatgttaaactcacaatcatgaacactctgttagtacctaaggatagtaaacaatgaaagcccgactgggttcgataatggagatcaaccaaagtctcaagtgcataagtacgaagagattaagcgtgaaagtgatcatcattaacgatcaagaagatcacagttatcgcttngttgtaagccanaaagacatgaagtggtgccttaact

SEQ ID NO: 14658 - DNA, 440 bp, Glycine max
  misc_feature (38)..(38): n is a, c, g, or t
  misc_feature (51)..(51): n is a, c, g, or t
  misc_feature (96)..(96): n is a, c, g, or t
  misc_feature (98)..(98): n is a, c, g, or t
  misc_feature (180)..(180): n is a, c, g, or t
  misc_feature (223)..(223): n is a, c, g, or t
  misc_feature (229)..(230): n is a, c, g, or t
  misc_feature (261)..(261): n is a, c, g, or t
  misc_feature (265)..(265): n is a, c, g, or t
  misc_feature (296)..(296): n is a, c, g, or t
  misc_feature (304)..(304): n is a, c, g, or t
  misc_feature (325)..(326): n is a, c, g, or t
  misc_feature (337)..(337): n is a, c, g, or t
  misc_feature (368)..(368): n is a, c, g, or t
  Coding DNA Sequence Number=SeqID_4879
ggttcagtccatgaggaggtgaccttgcgagttttggntgatcctgagttngaaaacttgcctgccgctaggattgcagctctttagaaagaagcngngcttctgttggattggcagaagataggtcctggggaattcagggaagtccccgagggtgatttcttaggtgaagtcactggntgtgatttagtgatttgtcacttcttcccttgggagttctttntatgcnngaatttggctaagcttttaaagtctcttgcnccantgcctcttgttccgaagttcatcaagcttgntgctgctnttgccccattctttgttccanntctggctctcntgactttgccttgtgtcttgttgttccgccncggggtccccgctgctcgcttggtcggctttcccgctttgggtggtcttgctgttttttccccttgatcgct

SEQ ID NO: 14659 - DNA, 306 bp, Glycine max
  Coding DNA Sequence Number=SeqID_4880
taccacaccacacataacaatttctgatctttctaaagctatagatatgaatatgcttagggatgcttaaacaaaatcgggtaaatgtgaataataacataaatctaataactacctaccatcctttatatacgggcttataacaggactggccttaaccggtctagaacaatacatattcaaagctaggcacccaattactctgaatcattttaaacctgatcatgaagctacaaatgctgccaaataacattctccaattcactatccaaaggctgacgatgtcttgttcttttatgtgcctac

SEQ ID NO: 14660 - DNA, 556 bp, Glycine max
  misc_feature (374)..(374): n is a, c, g, or t
  misc_feature (376)..(376): n is a, c, g, or t
  misc_feature (526)..(526): n is a, c, g, or t
  Coding DNA Sequence Number=SeqID_4881
ggacatgtgtcgctagagtgtatatgacgatgtgagatatacgacggtgaagccgtgcgcgacgcgacgtcggtggagtggagatgagtgttacctcaccgccgtactgcgtgctctggtgactcgatcatgcacactcacgctctctcaatccacactcggcgcctcctctcttctatagtacctacacatcacatcacatacgtgacagcagcaatgttacgacctgaactcatgtaacacggtgagcactctagtctgtttgtatatcttaattcgtgtacagctgaatgagagatgagttacatatctgagattagtatactagagagatcaggcatacaactgtcgagtctcgtcgcgagcagttgcgngngacatgacgaatacatttgaggatatgcatcgtattcatcgacacgataatatacaacgacagaaacatctgtgccacctacatctatactctcgaatccactattgcgacccgaactgttgtcatcgttactatgtatctgcggtgctncgcactagcgctatatacctgcctgtcata

SEQ ID NO: 14661 - DNA, 500 bp, Glycine max
  Coding DNA Sequence Number=SeqID_4882
atgaatgttatttcaactcatacatgtgatacaaatggccgcagggtaacaaaaaaattatgatataggtctggtgaaggtgacaaaggttacataagtccaactgatttcagatacacaaaagaatgaaaacagtaaaaagatatatttacacgaacacatcattgaaggtaaaaaggaaacatgagagtagtgatgacagaatccataagctggatattaaagttaaagttgatacagcttcaatttataccaattaaagtttgcaatattgtccacaacctgcgatgtgttcctcgtgccgaattcggcacgagggtgggataataacgataataacaaatggatatgaaaacgaaaaaaaaaaaaaaacaaaaacgatggtcagagtgaaaatttctttatggatggataatgttattcagtttagtttgatagtgttacacgtcaaaaaaaatgaagaaaaaaaaaacaaaagacgcaatctagaaattcatttt

SEQ ID NO: 14662 - DNA, 425 bp, Glycine max
  Coding DNA Sequence Number=SeqID_4883
ccacctcttcatcgcagctaagaaatccttagccttggcatctcaatcttatcaccaacttctccaccgctctcgcaccttccgacaatgccgctttcaatcgatctaggccggccaccaagttaactcggtttatccggttgactctgtttacccagttctgagttatccaagtgagtcgactagcgatttttatttctgggccaataaagagatggatggagaagaaggtggtgacatgaggaaattcttgagaactccagtttacatagatacatgcaatggtggatctgatcttgtgtacggtgttgaaaagaatggtgggctagtgaacgctaggggaaataatttcaaaagtacttagattcatagttcacgattacatgaggtcctgggtaaagattattgctaaacccaccgagctc

SEQ ID NO: 14663 - DNA, 512 bp, Glycine max
  Coding DNA Sequence Number=SeqID_4884
aaagcaagggagctcctactacacccgaaaggctacacttactcggaggtgaagaggatgaccaggtccttcgctcacaagctcgggcaaggcggctacggcgctgtctacaggggcagcatgcctgacggccgtgaggtggccgtcaagatgctgacgggcatgctggagggcgtacggcgaggagttcatgaacgaggtggcgagcatcagcaggacgtctcacgtcaacatcgttactctggtagggtactgcctccagggtccaaagagagctctcctgtacgagtacatgcccaatggctccctcgagaggtacaccttcggcagcagcagtggagaagacgccttgagctgggacaggctgttcggtatcgtcgttggagtcgcgcgagggctggagtacctccacacgggctgcaacacccgcatcgtgcacttcgacatcaagccgcacaacatcctgctggaccaggacatgtgtcccaagatctcggacttcgggctggcga

SEQ ID NO: 14664 - DNA, 573 bp, Glycine max
  misc_feature (42)..(42): n is a, c, g, or t
  misc_feature (47)..(47): n is a, c, g, or t
  misc_feature (84)..(84): n is a, c, g, or t
  misc_feature (197)..(197): n is a, c, g, or t
  misc_feature (461)..(461): n is a, c, g, or t
  misc_feature (514)..(514): n is a, c, g, or t
  Coding DNA Sequence Number=SeqID_4885
acatggccgtagtctacataatattcatatccagctgctccngcgtnttctgcctagacgacgcttatacagtcgatatcttgnccgagcgtataactgttgagatatctgctataatgcgttcatgtgactctagtgctaaatgatagacaacaacacatcatgttgtgtgaagtattataactgaaactactgtncagtacgtgtgtgctcgataaatactattgcatcgtggtccggcgcggtcatgacataagtaggttgagtagagacaagagagactgtgggtgcgtagtggcacttcgagtcagagtgcggcatattattatctaatatatcgatgatgagcggtgcggtgctggtggatagtagtgtgagggtgcggcgagatatacatatgagaggtcgagcgggcagagcgtagtgtcagagagttagtggagagcaaaacatgtgtgtgntttattatatattatcccaccagtatcgtcctctcccgcgcagacagaaagangcaagatacacagtgcaaagagcgagcgcggcactacagtacttgtatccctctcttca

SEQ ID NO: 14665 - DNA, 188 bp, Glycine max
  Coding DNA Sequence Number=SeqID_4886
cagaaggccgccaacacccgaaaagccgccgcgctgctggcgtttcaccataggcgcccccctgatgaggatcataacaatagtcgcctctcacgtcggtggcggaaccccccgggactattatgattccacgcggtttcccctggaggatgcctcctgcggtcttctgttgcgaccctgctgcttat

SEQ ID NO: 14666 - DNA, 328 bp, Glycine max
  Coding DNA Sequence Number=SeqID_4887
gaggcaggttatgtccatgccgaacgtcatccatgaaacctggttgcactaaatgatggatctctcgcatatttcagactttggaatgatgggggatattccaaggcattaccggattgggctcatacaaatgattgtgcactgtgttaatcgtgattctctgagcttggcaaatgactatccttctttgggatttacttctgaagggattgacacacattcaagtatctgatgctccgcaaagcatatttgctgatcggaccacttaatttcaagattttcacggaatcttgaacccactatatgattgtacgtatgaatttaactt

SEQ ID NO: 14667 - DNA, 591 bp, Glycine max
  Coding DNA Sequence Number=SeqID_4888
agagctagctagagtttcccacctcactccctcatcagctcactgtctcgctcgcctcgatcctcttctcttctcctcttcgtacaagctagagcttttctccctcccacccccttcgcacagattcgcggcttgaggaaggactcgcaagaagagtcggtgctgatggaggtctgcggcgccgaggagaagcagacgccgcccaagaagaggagcggcgggaagggggcggcgatgggcgtgcgcgcggatggcggcggcaagggccggcggccgtccttccccgggcgctgcgcgcggctcgtcaaggagcagcgcgcgcggttctacatcatgcgccgctgcgtcaccatgctcgtctgctggcgcgactatgcgtgaggcacgccgcgccgccgccgcgtgagaaggtcgaccgatccatcgaggagtagcagacagacaagctccctctctcactagcccaaggatcctcctcctgtgtaaagagtagtagtagattttttcctctaatttttcctttcttaccgtttgttagcattaagagtagagcgatgcagtgtcgccgcgccgcgcattttcttgtaatat

SEQ ID NO: 14668 - DNA, 583 bp, Glycine max
  misc_feature (191)..(191): n is a, c, g, or t
  Coding DNA Sequence Number=SeqID_4889
atagtccgggattctacatgagcgactggtgcgtgctttatattttgcgtgtgcgttgacattaatgctgtgtcatattatacaaatatatctactctggatctatgttgtcctggtcgttctaccattcctgcgtgcttctgtacacgcctctattgagtggcacgatgacacgttgcgtgtcgttgctntattctggccgcgcattaatatagagtcgatcaaagactcaacgtcaatcctactagctgcgtctcctccactacctccctgggcgcgggcgcatgaaaatcaatagagatggagcgtctggtgcaggattctctattgttgtggtgggagtggtgcgtggtagttgatatcttctcattactacatttgtgcgcgtcggccttttactcgggccgctgtgctacatacaatataatgtgctggagggcgggggtggagtgttggggggaacatattgcgatgtcaaaatcatactgctcattgctgcgtactttcttgctcggcgtggggtgtgtgctagtagtgctgcggcgtggctttagagtattggtctcatacctacatacttgcc

SEQ ID NO: 14669 - DNA, 486 bp, Glycine max
  Coding DNA Sequence Number=SeqID_4890
tgcacttcgtcttaggtctatcaggtgattccaagaatacaaataaggcagagtcacacacttcttccagcagaacaggcacaaaagtaatcctcgtactgctcggattcgtggctgtagctatgttctccttctttctgtacaagctatggcagaagaagaaaagagacgagcagtatgctcgactgttgaagctgtttgaggaagatgatgaactggaggttgagctaggacttcgagattaaaaaaaaaaattacaagctatcgacaaaatgcttgaggcatatttgtttgtgttagctttggttttttccgtgtaagataaattataggtattaattattaaagatggatcagagcatgggcctctttgtttcaccatttggccctttgtttcaccatttgtcatctacatataggtgattcatttgtatgatctatttagatgattcattcagactttcgtgactgtttgtttgtccatcc

SEQ ID NO: 14670 - DNA, 381 bp, Glycine max
  misc_feature (240)..(240): n is a, c, g, or t
  misc_feature (292)..(292): n is a, c, g, or t
  Coding DNA Sequence Number=SeqID_4891
tcctcccatccaaattccaaagaagcaaaaaggcggagcagagcaagaccaaagcggccagtctcttgcaagcctcgccgccgtcgccgccggctgatcagctccggtgcgtgcgggatgggcagcgggaggccggctgcgtggcggacgtgcgcggcggcggcggcggctgcgtgcgccgtgccggtggccttgtcactggtgctgctctggctgcccctgctttgctgcgccgtggcngtggtccggttccggcgggcgaggaggaggatgatgcagatgtgcggcggcngcacaagaggcggcgggcgatttggggcggttgacgccggcgatcggctggggctgctgcagaagtacctcgaggatcagctggagctc

SEQ ID NO: 14671 - DNA, 371 bp, Glycine max
  Coding DNA Sequence Number=SeqID_4892
atcacccggaaatcgacagcggcgtacacaccctgagcgtcctggagcaagccgcccgccatcagcaaccattgaccgtgcgctgggcctgcctgctgcacgacctcggcaagggactgacacccgaaagcgagtggcccaagcatattgcccacgagttcaaaggcctgaagctgatcaaggcggtgaacgagcgctacaaggcgccacgcgactgccaggaactggccttgctggtgggcgaataccacacccatggccatcgtgccctggagctcaaggcctcgaccttgctggagttgttgcagagtttcgatgtctatcgacgcccgcaacgtttcgaggagtttatcgcctcgtgcgagatggat

SEQ ID NO: 14672 - DNA, 571 bp, Glycine max
  misc_feature (390)..(390): n is a, c, g, or t
  misc_feature (403)..(403): n is a, c, g, or t
  Coding DNA Sequence Number=SeqID_4893
gcactgcggctattcgactgtttaccacagccctactatacgccatgtgtagctacgcgaaggtcacacatccccacccacagctccttctcacacagcgccgcagcagccggccgtcgggcgacgctggcagagaagtcagccgcaaactgggcggattgttcggcatcatatgctagtataggccggacgcgcgcgccctcccgtttcactattctgttatggtgtcgtgtccgggcgcacttcgggttggtcttccagtgtgttatactagtgtggttattcttcgtgttggtataggattgagtattgtggcttaacacttcttgcttgtttctaggcactaacgagctagtgctcggggtgtccgccctcctgtcatcgatcgcnccacgtggtaggnggcgcgcgccgagcggctcgtttctctgtccggcaaaatccatctcctcctcctagcttctctcctccccttctttcccggacaagcacccgcgtccacacctccttgcaaaacaacccaacacacgcacacgcacgcccccgcagcaagtgccctctcttaagaata

SEQ ID NO: 14673 - DNA, 576 bp, Glycine max
  misc_feature (175)..(176): n is a, c, g, or t
  misc_feature (208)..(208): n is a, c, g, or t
  misc_feature (374)..(374): n is a, c, g, or t
  misc_feature (412)..(412): n is a, c, g, or t
  misc_feature (497)..(497): n is a, c, g, or t
  Coding DNA Sequence Number=SeqID_4894
atatgcactatgactagagcggcgtgggtgggatcaagtcgtcgctggtgtgctgatagtaggttaaatatatagcatgtagaggacggtgggagtatacataagaataccggggttcctagaacccggagtctacctttctgtctaggtaggtcaggagtgtgttgtctctacnnaagtccagcagcaccacaccccccatctttcntctctcccacatataggcgcacagtgcttcatcttctatgaacggaagtgtgctggagaccatactatgattaacacagaccacatcactaaatattgtaatattgcactttcgctatttaatttcgttggactaatttctgttgtctgttattgccagggcgtcncacctcgcgcgtggtagacggtggcagggctgtccgtntccgcctgccgctgcggccacgcgcgcgaggcggaggatgctgttttctatctaatgtagaggaaataatgtatattttattatntctttttttatatatcgtgaaacatgcgttgggggggtctcctacggcgcgagcgagtaacaacactgacgagccgcgc

SEQ ID NO: 14674 - DNA, 386 bp, Glycine max
  Coding DNA Sequence Number=SeqID_4895
gattggtaaaggtttttgtcgagatggagaaggtgttcttactttgcagagcggagacaaatataaaggaaattggtcgaagaatttgctcgaatctccggcgacagttgaatatattaatggagatcgttatacaggaggtgttcaaaatagtgaattatatagagaaggatctggagtcctaatttgtaggaatggtgatcaatatgatgcaaagtggcggaaaggaaagctgcaaggtcgaggaacgatactttatacaaatggtctgaagtattcggtagtatggaagaatggtagagaagtattaagaacagtcatccctcccaaaaaagtcaaaacaagtgctggtagtctcatagaaccttctgcgattcaggcatgaa

SEQ ID NO: 14675 - DNA, 581 bp, Glycine max
  Coding DNA Sequence Number=SeqID_4896
aatcatggcgtttggtgacaggaaccagatccctggttactacgaatcagccggaatccaaatctttcccaaaggagataagtatgataggattggtcagatgcagttagagtttttcgggtggatgagggataatagttgtcagtacaccaacatgatggtggtgacacgatccgcaatggagttggtttcttatctcgagtataaaaacacgcaccacaacattctcttcgcgaatcctctgtacccgcaaacaaaggcttgcggctgcaaattcggagctaggcaagaagatcctagcgctgagacttgggtctgggaaaccctagcccttggaggagaccccagcatcaaaacagtagaagagccttgcaggtacagagagtagggtggtggtgatgttaaggattctgtttctccatgagaatggggaatgctcttctacatatttgctaattacttaaatgtttccaagtagctagctacatatttgcttagctgtttaatgtttataaacttgctacataattgcttgcttagtatttaatgtttctaatttgctatgtatttcttggtcgtta

SEQ ID NO: 14676 - DNA, 481 bp, Glycine max
  misc_feature (76)..(77): n is a, c, g, or t
  misc_feature (81)..(81): n is a, c, g, or t
  misc_feature (88)..(88): n is a, c, g, or t
  misc_feature (103)..(103): n is a, c, g, or t
  misc_feature (239)..(239): n is a, c, g, or t
  misc_feature (268)..(268): n is a, c, g, or t
  misc_feature (308)..(308): n is a, c, g, or t
  misc_feature (311)..(314): n is a, c, g, or t
  misc_feature (367)..(367): n is a, c, g, or t
  misc_feature (391)..(391): n is a, c, g, or t
  misc_feature (426)..(426): n is a, c, g, or t
  misc_feature (430)..(430): n is a, c, g, or t
  misc_feature (438)..(439): n is a, c, g, or t
  misc_feature (455)..(456): n is a, c, g, or t
  Coding DNA Sequence Number=SeqID_4897
cgctatagcgctgtgcgcggtcattgtgcgttattctcacatatatctcctctacatcttcagtttttgcgatggnntgtntccttantctctatatatcttncgctgagatagagatgtgtcgacagagctaatagttgaccgcgcgtcaacagacgtgagagtgcgagtcctgcatgtataggagagtatatagcgtgtgtgagtgtgtgtatatatgtacgagatcctactatttnatatactatggactgtctctgctcacgcnctgtctctctgctgagtgatacgtatcaggggtagagtantgnnnnggagagaattgagtacgccagtacggaggaggagaagagaatagaagcgcggnggagtcacacgcgctgtcgagtcngttgcgagaagagcagtagaggcggcctctcctgntacntttctctnnaaataggcacatcttnntagacagcgatgagtggcggccact

SEQ ID NO: 14677 - DNA, 327 bp, Glycine max
  Coding DNA Sequence Number=SeqID_4898
aaggcggaggaagcctgcttcgtcttggagaagatggcggagagtgggatttggatggatgcagaagggtggcggtctcttgctacatgcgtctgcagcggcggtgcaggtgaggtgaagctcgtcgatgagctagcgttgtcatcttgacatttccagtccatgcgaggctttgacagccttcagctgtggcatttccatttgtctattctctttatcttgcttcagttccagaagcatttagttgtgcaaggcaaaatgcataatgatatgggtataatggcagataaaagatgcgagtcttactgctgaaagtgaagttcgtca

SEQ ID NO: 14678 - DNA, 560 bp, Glycine max
  misc_feature (29)..(29): n is a, c, g, or t
  misc_feature (74)..(74): n is a, c, g, or t
  misc_feature (78)..(78): n is a, c, g, or t
  misc_feature (87)..(87): n is a, c, g, or t
  misc_feature (259)..(259): n is a, c, g, or t
  misc_feature (271)..(271): n is a, c, g, or t
  misc_feature (275)..(275): n is a, c, g, or t
  misc_feature (328)..(328): n is a, c, g, or t
  misc_feature (354)..(354): n is a, c, g, or t
  misc_feature (401)..(401): n is a, c, g, or t
  misc_feature (430)..(431): n is a, c, g, or t
  misc_feature (436)..(436): n is a, c, g, or t
  misc_feature (452)..(452): n is a, c, g, or t
  misc_feature (457)..(457): n is a, c, g, or t
  misc_feature (460)..(460): n is a, c, g, or t
  misc_feature (472)..(472): n is a, c, g, or t
  misc_feature (515)..(515): n is a, c, g, or t
  Coding DNA Sequence Number=SeqID_4899
atgctcgacgcgtcctagcggacacacgnacacagcgtcaggactagtagcactactcagctctctctactcanactncacgcagtnacgcccgtcgaccgcgctcactcgcgccgcacgtcgccgtggcactcagcgctactgtcgtctctacgactcccgtctactcgcacacatgtgtacacgcttatcatagacgtgtgctgtcgcgtgcgatcggtgatctgttctgcatctgacttactacctgcatctcacntctctctgctanttcntctacttcgtgtgtgtagtgtcattgtattcctgactcgtctctctctgcgcntcattctatgctctcacttcacgcanctggtgatgcgtgtacgtatgcgttgtcgtcggcgtcctgatcgctngctcgtgcgtactgtccgtcgtcgcagcnncacgngcacgacggtcagagnacgangtngcgacagagcgncgccgaagggacgaaggcgatacagaagacggtgagatgaaanctatgagactgccacgtacatatgaatatactgccgatgagtgta

SEQ ID NO: 14679 - DNA, 551 bp, Glycine max
  misc_feature (515)..(515): n is a, c, g, or t
  misc_feature (526)..(526): n is a, c, g, or t
  Coding DNA Sequence Number=SeqID_4900
gacgtatcatggtggccctacacttacaactaggcgtatgacggggacgagtgcggttatagcggtccggctgtcgcggatgaatatgaccagccatcgttcgatatcacgaaggataaatgcagcaaatgcctgagcggttgtaagttccgcaattacgtcggcagctttgacggcttcctttccgttagcaggctttcgcagtaaatcccatgacgcagacagaatcagcgattctggcgcacgcccggcgatataaaacagcggagtcgtgcggcttcgtggtaagcacgccggagggggaaagatatttcccctgcgtgaatatctccggtgagccggaggcgtatttccgtatgtcgccggaagactggctgcaggcagaaatgcagggtgagattgtggcgctggtccacagccaccccggtggtctgccctggctgagtgaggccgaccggcggctacaggtgcagagtgatttgccgtggtggctggtctgccgggggacgattttnagtaaaagcancccgggggatccttctgcgtagtgc

SEQ ID NO: 14680 - DNA, 190 bp, Glycine max
  misc_feature (86)..(86): n is a, c, g, or t
  Coding DNA Sequence Number=SeqID_4901
ttaactcgggatgtcgtccgttggattgttttcggtacacatgcacactgcggtgcacgatgggatagagcctctggtggcgttcncgcgcagagtattgacctaggtgatcttctgtcacaaagtttcgatttccaacagtgataatatttggctattaacatagacggtctcaggaatatggagcaat

SEQ ID NO: 14681 - DNA, 462 bp, Glycine max
  misc_feature (151)..(151): n is a, c, g, or t
  misc_feature (413)..(413): n is a, c, g, or t
  misc_feature (420)..(420): n is a, c, g, or t
  Coding DNA Sequence Number=SeqID_4902
atacatgcttcactggtctgaggctcgttcggtgtcgtattatggttgtggcgaagtggtagtgcgacgagttgtgacgcatctctatgctatatccttggcatggcgtctctcgcgtgagtgtgtgatcacgtgatgcatatgtagagcngaggcggcgccggacgtcacgttgtgccctgtctagtgtgatgagcgagagggtgtcgcgatatggtagctagatcgtagcctatgtatcgctagattatgagcggacggcggggtcatgtcctggtcatggtggttcgcgtcttccgattcgtcttactcatcgctacacagacgcagcgcgacattctagtactgtgtggacatctatggccttttctgagggagtgagacgtgaccctgctattctataataatcaatnattctcnttatatctctctactactatcgtgaatcctccgggcgcgcag

SEQ ID NO: 14682 - DNA, 531 bp, Glycine max
  misc_feature (168)..(168): n is a, c, g, or t
  Coding DNA Sequence Number=SeqID_4903
tctactcatattatccgtgtcgtgcgtctggcgccgactatgctaagtgaggatctttagtagtgtgctgcgaatacctgaatctcacaatatgcatgcagtcgcagattagcccaatgaccaagtagcagtacgcttatacgtgtacacctcacgccacgtctctancactcccttcgccacgatgatctcactcgagtcccccactcacgtgttatgaattgttcattctacagctacacaccctgtgtgttcagtggagaatcgagcggatgttatcatatactctcagcgttgagcagtgcaagacgttatgcgcgggcttagtctatcgacgctctatagactcagtgcgagcttgttgcactaagctatacagtgtttcacatgtcatacgctcatctcggcgagcgtaatacccttccatcatccaacattacgcggtctctgctatcgtatgtggtagagtgtgtgtctgagactctatatcagcaaccacgtgtgtgagcgttatcactatgctcgcatcag

SEQ ID NO: 14683 - DNA, 372 bp, Glycine max
  Coding DNA Sequence Number=SeqID_4904
ttttttgccaagtaagactcaacgcatcaaatcatctgacacaaattgaatccaactgattagatttacaaactaattctccatttgcgtctctttccaaacaatttacggaaagggtttattctacacatgcatggtgaatcctgcatgggcctatttcgccaaccatcctgacaacatcacttgtacctgcatcctacgcctgctagctgagttgacctgcacctgtctgctgggctggtacttgctgctgtatcgccagttaaaggggagaaatccaatggcagctattacaccagcaggggactcttcttccgtgattgtttcaccgctcttcttgttatgcttcttggcgtacctctggttcctcag

SEQ ID NO: 14684 - DNA, 381 bp, Glycine max
  Coding DNA Sequence Number=SeqID_4905
agattccattctcaaagcattcgggggagagagtgagattggaacacgcgtaagtgtgaatatcgatacaaagtgacctcaaccgaccatcagtcaggactgtcgcctcactcagaggctggtggcatgaccattctggaacctgaagattataagtatggcccgcaagtaagaagaggagatgaatggactacagttaagcctgtcccaaacgctaaaagcatcaacattgggggccaaattcaggtggtgagcaatgtaatatacaagagtgtagaccgcagggtgattgtgacatcaaacaaagatcgagtgtctttggattgataatacaacaagaggagtgagggaatcataggagctgacaaggagatcgtgaca

SEQ ID NO: 14685 - DNA, 543 bp, Glycine max
  Coding DNA Sequence Number=SeqID_4906
gccttttcgtccttcattattttatcgcgtgtctgctagatgtattctctggtgtactgctagaatcgctgttatttatttttgagctcgttggtactcttgtgcgtccggtttgtcttgcgcatttgttacttcgtatcgcagccttttcttcctctgccgttacgttttcatataattgtttctgcctatgttcgctgttagagttatgctctcttctgcttttatcataccaggatcgcgcccacgtgccgctccccctctgtctctactgtgatcggtcgctctgctcatgtttctttgtgtatcatcttcgtctgcatttggacgtgcgttagtaggtaatagtaaaaatacaccacttgtggtcctaattctcgcgtctcactatcccttttccacttgtctgcgtcttccttttattttcacattgtcggcacaatatttatatctctcgtcaccccttctcatctcttttttggggaactaacatctcgcttcttcccttttccgcccccacgcatctcgttgactcttgtgagg

SEQ ID NO: 14686 - DNA, 566 bp, Glycine max
  misc_feature (135)..(135): n is a, c, g, or t
  misc_feature (157)..(157): n is a, c, g, or t
  misc_feature (161)..(161): n is a, c, g, or t
  misc_feature (173)..(173): n is a, c, g, or t
  misc_feature (178)..(178): n is a, c, g, or t
  misc_feature (182)..(182): n is a, c, g, or t
  misc_feature (190)..(190): n is a, c, g, or t
  misc_feature (244)..(244): n is a, c, g, or t
  misc_feature (259)..(259): n is a, c, g, or t
  misc_feature (271)..(271): n is a, c, g, or t
  misc_feature (298)..(298): n is a, c, g, or t
  misc_feature (301)..(301): n is a, c, g, or t
  misc_feature (307)..(307): n is a, c, g, or t
  misc_feature (313)..(313): n is a, c, g, or t
  misc_feature (328)..(328): n is a, c, g, or t
  misc_feature (330)..(330): n is a, c, g, or t
  misc_feature (354)..(354): n is a, c, g, or t
  misc_feature (414)..(414): n is a, c, g, or t
  misc_feature (416)..(417): n is a, c, g, or t
  misc_feature (439)..(439): n is a, c, g, or t
  misc_feature (450)..(450): n is a, c, g, or t
  misc_feature (463)..(463): n is a, c, g, or t
  misc_feature (467)..(467): n is a, c, g, or t
  misc_feature (469)..(469): n is a, c, g, or t
  misc_feature (519)..(520): n is a, c, g, or t
  misc_feature (524)..(524): n is a, c, g, or t
  misc_feature (532)..(532): n is a, c, g, or t
  Coding DNA Sequence Number=SeqID_4907
gacatcataccagcgatgcactgcatcgtcgcacacgcacacagatctgtttagtgtctgtagagcattcatcgacatctaccgatgtgatatgaagcccgactcacactcgtacaccaactatgcggactcatngtatgatgacgtcctgtaccantgtnctcgactcattncactnactntcaccgtnactacgtcactgctactagtgtagccatccatctcgacacactctcacgcccantcatactatcatatngatgtatctacnacgagatacatgatgacgagtgaggcnagncagcgncgattngactactgacacgancngacgcgtgatcgtgtcatcatcantgcatacacacgccgacgtatcacgtcgactctaacatctgatcgtcatccgctgcatancnnctatgcggacagtgccctctcncgtactctcancgctcttcataancatnanctgtcatgtcgtcgtcatgccagtcctgaccgtatcattccaacagccanntacnaccaggangccgatatagtatcatacgtactcgtcgatcagc

SEQ ID NO: 14687 - DNA, 457 bp, Glycine max
  misc_feature (149)..(149): n is a, c, g, or t
  misc_feature (282)..(282): n is a, c, g, or t
  Coding DNA Sequence Number=SeqID_4908
agtctcatctatacgacgattggcacgaactgtcctgacacacacactgatatctctctcgcctattactccgtgagataatgttgtgcgtcaacgactgagagagactcatacgtcattatgttgatatatactctggtcctcgaccnattatttatcgcaggatactcttagacgatatattatgcgcgccacgtcgacgcccgtgcggcggcctgaggcttacgccgaggtaaacgactagacgatcgctcactcgctctatatcgaagagtaagaatncacgatcatatctcaagccatcattatcgcgcagatattctcataggtatactggcacatcatctcgacacgtatctacatcgatgcagggtgtgactatactcgcatgcatatatatatatacggcacaatctctacaatctaagatgtgatgctcaagcatacggttctctat

SEQ ID NO: 14688 - DNA, 504 bp, Glycine max
  misc_feature (139)..(139): n is a, c, g, or t
  misc_feature (326)..(326): n is a, c, g, or t
  Coding DNA Sequence Number=SeqID_4909
tgagcgcctagtcacgcatcatcgacttgacagcgagacgctcctcactagcacctacgccgagaaagatatatagacatacatacgttcctcaccgacctatcacactatcctgcgagagacaagcgacaacacgacnaacctctcctcgtcatccatgtggacaagtccgacatagactcatgcaaggactaagagtaacagatatgatctgtctggcattcctaccgcagcagaggacagatacgatcacataccaatgtaggacaacactgaagaggcatgaacaacttaagacatgcacgcatgcaagccacgccttaagnctgatgtataatatcactagatacagccctgagtaccggctgactaaagtatcttacagctctacgacgacagggtcacgtgcataatcctgatcgagcctctccaggaagatctgctccacagcacagacacctctcccgcgcgagctccgcgagggagcatcctacctaagacagc

SEQ ID NO: 14689 - DNA, 500 bp, Glycine max
  Coding DNA Sequence Number=SeqID_4910
accacactacaccacatgcttatgtgtgccattctttgacctattacacctgtgcgcagcagcaaccatcactatagcctttccattattataagctaccggctcttcccactcgcactcgtggcagtcggttccctctcatactacatcttctctctcacttactccctctgacaacacacgcattgtcacacttatctcatctttacttctcgggccttgcccgatgtccccccagtttataatacgagcgtttatccatcacaccacatatacaatcccccacacactctcatgatagaccctccgctaaaagtgcgcgggacgaataaacagatctaaacacaagacaaaacactgccacgaaccaaaaacaagagactaatagaaaaatagaggtataaagccctcttcgccaaatagtcagagtgctctttcttgctacaagaaagatatttattgactaaacgactcagtctcacatcccctgtaataggata

SEQ ID NO: 14690 - DNA, 524 bp, Glycine max
  misc_feature (115)..(115): n is a, c, g, or t
  misc_feature (209)..(209): n is a, c, g, or t
  misc_feature (228)..(228): n is a, c, g, or t
  misc_feature (281)..(281): n is a, c, g, or t
  misc_feature (343)..(343): n is a, c, g, or t
  misc_feature (347)..(347): n is a, c, g, or t
  misc_feature (373)..(374): n is a, c, g, or t
  misc_feature (381)..(381): n is a, c, g, or t
  misc_feature (450)..(450): n is a, c, g, or t
  misc_feature (484)..(484): n is a, c, g, or t
  Coding DNA Sequence Number=SeqID_4911
ggaaaaaagcacatcacagacacgaataaagatatatataaaaaagtataatggagaagcgaggtgaatatggaagtagatatgaaggatagatagtagaaatatgtgcttcggnagcgggatttatttgcatgaagtagagaaatcgcaatgacacatggccaacacgcgaccgcgtcaggcttggtggtggtgctgtggacgtcctnttcccttccacgtactcgnggccgctgcgcgccttatgcccgggtccgtgcgggcggcgtggagaggggagngaggggaaacacgtatataaaagattagacagactcgctaatacacaacataattatgacanaaanattttatgagacataatccgtttttnnatatatntcggtgcctgttgcgcgatctgaggacgaatacccctcctcttgcatgaagacaacaacctagacgcancctacaatatccatacaatccacaccaagagcanaacagaccgagaacagaatcactcacacagcagacctggg

SEQ ID NO: 14691 - DNA, 473 bp, Glycine max
  Coding DNA Sequence Number=SeqID_4912
tctcacaggcgaacggtacgtgctgattgcctttttgtatggcgtgcagagtttagcttaaaagggatatcaaattagttaatcaccttacaagaccatcccttttgacatgcatttgttaccaaatgaactaatttgtttgattgcacccccgcaaaaaaaaactattttgattgcatgtgtccgtgcagccgagttcccaaagtgctgcgacaactgcaggttcttctcgggggccgtggtctgcgacgacgccggccccaagtgccgcgacggctgcgtgaactgccgcgtcgtgcagacgagccccaagaagacgttccggtgcgccgatgcacgcggcgacgacggcacgccctgcccgccctgcaagaagtactgatcgctcatgctcaataagatggtgcgccgatcataaaagctcggatgggttgagcagagctgttgtggttgtacgtgcacgtggtccacgc

SEQ ID NO: 14692 - DNA, 406 bp, Glycine max
  Coding DNA Sequence Number=SeqID_4913
ggctgaagcacagctgccagaccaacatggtaaccctgtcccgctcaccgatcaatacggtaatccggttatcttaactgacaagcgcggcaatcccgtgcaactcactggtgtcgctaccaccgctaccggcacagcaggttctgggtttgggtcctatggaaccggtgcttaccgtggtggtgcaagtgcaaccaccgaggcagagttgttggcaacctaaccaaggactggcagggaagctatagagctacttcgttccttcagttcaagctctagctcgtatgaggatgattggcaaggtgtgacgatgaggaatggtatgaatgatataattaaagataaacaaccataggtaggaggatgcatttataatatggagcatgtatacaatatatctgatcca

SEQ ID NO: 14693 - DNA, 290 bp, Glycine max
  Coding DNA Sequence Number=SeqID_4914
atgcgtcggaacacagcatcctccagaccaatcagccccggatgcgtcggttcgttgcgtaagcggctcagcagccggtccagcctgtccgtcaaagcatcgcacatagcgggcagatctgagcaacagcgacggagcagccgcaacgctatggcgccgtcttcgtcatgccgggcatatccttcatcatcgcgtcatggtcttcgggcgcactggctattgccgcctgatattgggcgggtgacatacgcggaagttgccttacgaaagccaccatatcccagatcagt

SEQ ID NO: 14694 - DNA, 494 bp, Glycine max
  Coding DNA Sequence Number=SeqID_4915
aaagcacacgggtcagaatcctcctgacaacatcgtctttctatgccagttttagatctccaactgtctatctaggtggtaacctgcagtctagttacaggattaaaatgtaagcctgatattataagctgttaatcggagtaggatcgttttttccgtcatgcatccgttcagaattgttgatacagatcatcgaagccgtgagcaccattgttgatcattcagaggcaaaagtgtgaaagaagtttaattctgtgctgcaaccgagtgcttaattcttctcatttacccccttatgtcgtcttctcactgccgaattattgccaaattagttccctcagactgattttgcatggaagccagcaaatccttgacagaagggtcatttgggtcaaccccaggaagcgatgcaaggatagaagatacaaaggattgatcagctaacaatttgctcatgtctgactggcttgattgatcctttgcactatctgtta

SEQ ID NO: 14695 - DNA, 584 bp, Glycine max
  misc_feature (170)..(170): n is a, c, g, or t
  misc_feature (401)..(401): n is a, c, g, or t
  misc_feature (417)..(417): n is a, c, g, or t
  Coding DNA Sequence Number=SeqID_4916
agaaggtcgcggagtcgtctactgatgatgtatgtggatcgtgattgcgaccaatatgggcgatagactgcagacgtgcgaggcagcacatctatagaatggtgcatgtcactgtccagcgctgaagctatgcaacgtcgtcatttgcatctgctccatcatactcatgntatagtacgctcacgactactctcgactcgacatcacggcttcaatgagtacagacagctacggagatggcgcgaacatagcgactggcatgcgtacagcgccacgcgatcagtgctgtgatatcgtcgcctcccatgaatacctatgacgacggctcaggtgatcgtattatgatgttatacgacacacgctgtcgactcagccactgctacgctccactaacctcagtngagtacgacgtcgagncgtgcggccagtaatatgcgataggccactctactactctagacacatgcgagcagtgtgtcactgcatcactcgtacgcggacgtgaccatcgctcttgctccagatgcgtgcgatcctgcgcacgtacgtcatgtgtcgtgtagttcttcatactcacatgcaga

SEQ ID NO: 14696 - DNA, 255 bp, Glycine max
  misc_feature (53)..(53): n is a, c, g, or t
  misc_feature (200)..(200): n is a, c, g, or t
  misc_feature (209)..(209): n is a, c, g, or t
  Coding DNA Sequence Number=SeqID_4917
gccccgcccctctgggtgttggtgtttgtgtctttgccccgcggtggcttgcnggcgtctctctttggtgttggtgggggggggtttgcgtttgcgttgggggcgccggttttgccttgtgttggctgttgcttgtgctttggtgttcttgcgctttggttgtggtcctccggtgttccgtggtgttctcccgccgggcnctgttctgnttgtttctgtgtggcgtgggttggtgtgtgggtttggcttgtctag

SEQ ID NO: 14697 - DNA, 567 bp, Glycine max
  misc_feature (473)..(473): n is a, c, g, or t
  misc_feature (542)..(542): n is a, c, g, or t
  Coding DNA Sequence Number=SeqID_4918
aagcataactcttccgtatatcctaagagctactgtatagttgagatgtaaagttggttccccctcacccacacagtgtaggcagtggtcatctcttatacttctatgatacatcacactttctcttcatatatcatcttttctacaaacatctcactaatagtataatacagcgcatcataccgcgagaggcggtcaggtttccttcatatgtcactaacttgctgtctccctgtcgccctactcccacatcccatctggactccactgtactaactctcaagatacacaacttattctcccacgaacctctatatccttgagccttaattaattgtatggctgtcatacgcgcagtctccagactactacgctcctctcctctcttaacgtcgtcgtcagattagaatgctatactgacctatatctgctcagtatcacctcgtcacgacttagtaatctcctcgactaantgtgtaatcacagtagctgtcgtagtgacctctatctctctgtagatatctactaatcaatgtgtgagnaatcttcactctacacgtgtgacag

SEQ ID NO: 14698 - DNA, 538 bp, Glycine max
  misc_feature (94)..(94): n is a, c, g, or t
  misc_feature (374)..(374): n is a, c, g, or t
  Coding DNA Sequence Number=SeqID_4919
gaaccagtcacaaccagtcatagtctcacactggaaggcgggagagggagttggaataatagtgagtacataagaaaccccacccccacaactntcctcttttggtgcgaggaccggtgctgccgcgagccttgtccagagaagagacggggcggtggccggagatgagggtgggtccgtgatgggtgtaggatcttttcctgcgtccgtacaagcgccaggttaatgtgtacgagtcgtgccgggtgcaatgcgtatggtagtgttacatgctcgagagagatgtagagagaaatggagatgtggacaagtaacggagcacacagaggagagcaaggtgcagaggcgcgacggtctgggccattggacccggncactgagcgtgaggaaaagagagagttgcgcaacgcctgttggcgtcagcggacagccaactgctatctggcagagtctagcgtgcatagcgcaatcgccatgatgtgactatgcgtgtgtctcgtaaaacatagctcagagaaccaagttcgcagtactatag

SEQ ID NO: 14699 - DNA, 503 bp, Glycine max
  Coding DNA Sequence Number=SeqID_4920
tatacagcagactcaccataccataaccctctcgccctacacgtaaccactacccacgcattactcacatcgagccagaccacctctacagcccgcgctgaacagtctctgatatccctaccaccctattcctttccagatacacataagatccgtgaacctgcacgatacacgtcccgcacgattctattggcgcgactcggtatactctccagctgcacgaacttacgctacttagactaaagcatacctattgcggcttccccgacgccacgacgcgcacttcctactgtcaccactagacattattctttatacacattgctcgtatgtcgtaccgacccaggcttcgcatactatacaggtagaacccaacaacacttcagccaatagcaacgcaagacgaatgcggcacgtagcgcacagaccacaatatcgacatcaatatgtacgccgcactgtctagaatactctctacatgatccatccattcgtaatctctc

SEQ ID NO: 14700 - DNA, 549 bp, Glycine max
  misc_feature (34)..(34): n is a, c, g, or t
  misc_feature (178)..(178): n is a, c, g, or t
  misc_feature (398)..(398): n is a, c, g, or t
  misc_feature (466)..(466): n is a, c, g, or t
  Coding DNA Sequence Number=SeqID_4921
attacgcagacttccgactacgtcccacactctncaacacactctcaccagatcactatagctaagttcgaatgatgctatcaacactcgcagcgacatgcgcgcgtaactactatgcattatagttatgttagcgaccatgctcgctctcacacgcgctcccgcattccaccgcganacgggcacgtacacgcttagtctatgcggtgtcgactgcgccgcgtgcgctccacgatgtgcgcatacaccacgcagctttgtcaactctcgtattcccgcaactcgcgaccgctaaacaccacagatacacagtggtgcctgagcttgggggaatggatacacctgctcgcgcatcagggatgcatataccgctgatcctcctactagtacagcgcgcncctcgatatgcctcactcagaacatccatcctgctgacgctccacacgatactcaactccaccgccgngcactactccggctgcaccggttacgtatccgcgcgcgcgcgccgtcacgccgtccgcacacacatacgtctgctgaactcca

SEQ ID NO: 14701 - DNA, 581 bp, Glycine max
  misc_feature (114)..(114): n is a, c, g, or t
  misc_feature (366)..(366): n is a, c, g, or t
  misc_feature (431)..(431): n is a, c, g, or t
  misc_feature (536)..(537): n is a, c, g, or t
  Coding DNA Sequence Number=SeqID_4922
aattctacacccatgtgtgcaccaccactccaattgttattacaaatctctcatttattactacgaataatgagtagactgtactatgcaaaaaggaaagcaccaacaacagcnatatggtggtcaagactaagtctcgccatcacgactaccacgccgagccttaagtgcaaaggagcacacacaaaaatgaagattgattatatacacacatatagccgacccgtccaaagtattacgaacaccatgtgtcgaatatgatagatacgcgggcgcggtcatagaaccgcacgaaaggtgtgttacacctgcctgtgcacaattgcaaggcgtgcccacacgatagacacccacagcacacacgcngcgacgcaagggaggagacttacattgatatcacggtagtataacaagccacaaacaacacaatnagaacacacccaagggagtcgcctcgttacgacgacgcgcgcgaagaccacagaggatgccaagcacccctccgccccacctacgtgagtataccaaccactaanntaacacagatgaccacgccccaacctcccgatgcacagatagtg

SEQ ID NO: 14702 - DNA, 595 bp, Glycine max
  misc_feature (35)..(35): n is a, c, g, or t
  misc_feature (253)..(253): n is a, c, g, or t
  misc_feature (283)..(283): n is a, c, g, or t
  misc_feature (301)..(301): n is a, c, g, or t
  misc_feature (349)..(349): n is a, c, g, or t
  misc_feature (403)..(403): n is a, c, g, or t
  misc_feature (450)..(450): n is a, c, g, or t
  misc_feature (457)..(457): n is a, c, g, or t
  misc_feature (479)..(479): n is a, c, g, or t
  misc_feature (484)..(484): n is a, c, g, or t
  misc_feature (560)..(560): n is a, c, g, or t
  misc_feature (562)..(562): n is a, c, g, or t
  Coding DNA Sequence Number=SeqID_4923
ggccgcgtacgctgagtactaatctcagtggtgtnatgatcgatcagtgttgcggcgctgatagctagcggcacgaacgcatacagatcacgttcgatccgcgctgaacctgtacgatctaactaagccaatgtcgtggttatcagatcgatgacgaacgagaagcgtatcaagtgcagagcgacttcacgttacgctactctttacaacgccatgcgcatgcactgatatatgtcactgtctgcggtattantcgcgtgtctactgcatatgtgacgttcgnaccgtgtcgtcgcggccntgcgtgttgtccgagaccgtgatatgtcaatatcgagagagcagtttngagacgtgcacagatcaccgacgcatagacgcgatctgcgacgtgagtagatcntgcgagcgttgatccatatagtcgtagcgtcgcactgcgctgcgcgnggcttcntctacatagagctgtcctgtgntgtcnagtaataagtgagtctgttgcgtgctgatagtatagcagtgagatacgacaatcacgcgacgtcgtcgagccgtantnagtagtccatcagctacagtgcgtcagcataca

SEQ ID NO: 14703 - DNA, 487 bp, Glycine max
  misc_feature (160)..(165): n is a, c, g, or t
  Coding DNA Sequence Number=SeqID_4924
ctctcttcaggagaagccaatgttgacaaaattaaactctttactctaaaggacttagacaaggccactgatcactttaatataaatagagtactcggaaagggaggccaaggtactgtttacaaagggatgctagtagatggaaatatagttgcagtgnnnnnntttaaggtcaacggaaatgttgaagaattcatcaacgaatttgtcattctctcacaaattaaccacagaaatgtggttaagttgttaggatgttgtttggagaccgaaatcccattgcttgtttatgaattcattcccaatggtaacctttatgaatatttacttggacaaaatgatgagttaccaatgacatggggtatgcgtgtgagaaaatacactgaagtggtgggagctataatgtatttgcccttgtaggctttgtgaacccgtccactcatgggccttgcagaccatatctatcgctccggaggtgaaaaggcag

SEQ ID NO: 14704 - DNA, 533 bp, Glycine max
  Coding DNA Sequence Number=SeqID_4925
atactcacactcatgtttctgctcgcactcctatttgtttaagattcatcactcctgatcctgtgtatgtagtctattatttgcactcgtgtatcctgcgctacatatacattccttctgagcactctgtgtttatattattgtatatctctttttttgtgtctctatttacttcctttctctctcattgttctctcgtcttgcttcttattctctcgtcacttgactgcttatccctctctcgtctcgccacctcgccctcctactctcgcgtgatcatccacggtgtcatgtctattatatgcgtgcatactactatcattatatgtactctgtcctactccgccgagctacacatactcctgcgatcagttatcatgctctctcgtccgcttgtgtatccgcccacatcaccactcatgccaacacctctcgcaactctcatcctacatatcatcacttactataatattcatctaatatctctctgatctcttacctctgcgtcatcatgtcactctatacatctctcc

SEQ ID NO: 14705 - DNA, 494 bp, Glycine max
  Coding DNA Sequence Number=SeqID_4926
gcgcctgccgacgtaattttatttattagatgatctcgtatagtgggggtgtgctgggtatatcggcgtccgtgtaattaatgagtttcggtcttccggcctcacccctcaaccacggggcccgggccggccccccgcgttggagctatttgcgttccgcggtcttgcgcagcctaaatattagtctccgggcttagtaaccacccaatgggcggcaagaatataatgctcaatcggtgatatacatagatgatatattggtgcaattttattcgtgtcgaataactaaattaatacgttcccggtcccacctggcattatagttgcggggtatataagaggtttgtgcgctcttccatgcgttcagtcctatatataacggaccgttgcgtacgcgcccaagaccctcgctccgccgcggggggaaatattccggtgtctctcacctcactctctttcttctttgtggggaaaatactctgcgccctttttct

SEQ ID NO: 14706 - DNA, 575 bp, Glycine max
  misc_feature (54)..(54): n is a, c, g, or t
  misc_feature (86)..(86): n is a, c, g, or t
  misc_feature (90)..(91): n is a, c, g, or t
  misc_feature (95)..(99): n is a, c, g, or t
  misc_feature (127)..(127): n is a, c, g, or t
  misc_feature (130)..(130): n is a, c, g, or t
  misc_feature (155)..(155): n is a, c, g, or t
  misc_feature (158)..(158): n is a, c, g, or t
  misc_feature (173)..(173): n is a, c, g, or t
  misc_feature (179)..(183): n is a, c, g, or t
  misc_feature (185)..(185): n is a, c, g, or t
  misc_feature (207)..(207): n is a, c, g, or t
  misc_feature (213)..(216): n is a, c, g, or t
  misc_feature (223)..(223): n is a, c, g, or t
  misc_feature (254)..(254): n is a, c, g, or t
  misc_feature (256)..(256): n is a, c, g, or t
  misc_feature (285)..(285): n is a, c, g, or t
  misc_feature (287)..(287): n is a, c, g, or t
  misc_feature (289)..(295): n is a, c, g, or t
  misc_feature (310)..(310): n is a, c, g, or t
  misc_feature (332)..(335): n is a, c, g, or t
  misc_feature (338)..(338): n is a, c, g, or t
  misc_feature (359)..(359): n is a, c, g, or t
  misc_feature (361)..(361): n is a, c, g, or t
  misc_feature (364)..(364): n is a, c, g, or t
  misc_feature (366)..(367): n is a, c, g, or t
  misc_feature (380)..(381): n is a, c, g, or t
  misc_feature (384)..(385): n is a, c, g, or t
  misc_feature (401)..(402): n is a, c, g, or t
  misc_feature (407)..(407): n is a, c, g, or t
  misc_feature (409)..(409): n is a, c, g, or t
  misc_feature (434)..(434): n is a, c, g, or t
  misc_feature (436)..(436): n is a, c, g, or t
  misc_feature (438)..(441): n is a, c, g, or t
  misc_feature (443)..(445): n is a, c, g, or t
  misc_feature (448)..(448): n is a, c, g, or t
  misc_feature (462)..(462): n is a, c, g, or t
  misc_feature (496)..(503): n is a, c, g, or t
  misc_feature (505)..(506): n is a, c, g, or t
  misc_feature (518)..(521): n is a, c, g, or t
  misc_feature (523)..(523): n is a, c, g, or t
  misc_feature (538)..(538): n is a, c, g, or t
  misc_feature (543)..(543): n is a, c, g, or t
  misc_feature (548)..(549): n is a, c, g, or t
  Coding DNA Sequence Number=SeqID_4927
tgcattcttatatgactgtactacataactgatagtctcgtcgatctgttgtcngagcgagagcgtcgagcgtactctataaagtntcgnncggnnnnncgcccgctgcagcgatgtcacgcgcgtngcntactaggccgtatctagcgcgagcnccntacgtatgaatgctnactcgnnnnntngtcgctcttcactatatcatgngtcttnnnnttcgtcncgttgtgcctgagtagctaagtgctgtgctncnactgactactcactaccagagtctgaagntngnnnnnnntgtgacaccgcgcgncgcatacactactgtatgtggnnnncgntctacgaacgagatatcgctncngancnncgtggtagatatnncanntgcacatacacagtanntttgntntcatagtttacatcacgacacatcntncnnnncnnnacntcaccctgaactcnagactgtatagaatgatgtgcttcatggctgcgnnnnnnnntnnctcactatcccnnnntntcgatgaacgactanctcangtgtnncacgttgaatgctactgctgtcatgc

SEQ ID NO: 14707 - DNA, 223 bp, Glycine max
  Coding DNA Sequence Number=SeqID_4928
aaacggatccgatctaggtcgtctcttcttcttcttcttcttcttcttcgatatctatctccatcgtggatcgaagagctaaggtggaacatggacaaaggcaaagcagtgatgggtgctggccggagatgggccgtcgatttctccgatcaatctaccgttccatcttcccgcgacatcctcgatccgcctggcttctctcgtgctcctcccgaacaggatg

SEQ ID NO: 14708 - DNA, 445 bp, Glycine max
  Coding DNA Sequence Number=SeqID_4929
atctacttagtacaataattcagcaaaaaaatttacttagtacaataatttataaaatcacttataaaaatagataataaaatgtactactaacaaacgtgaattaacatttctctcacgcgacaaattagatgtctccaaagtcattattcacctacaggggagccacttacgaaattgagttagttacgctgatgcatcatcaaccaatgaggtgccaccaaaagcaaagccaatagaataggagtctccacttcaagttgcaccaaaaaaacaaggtcaaaactaaaaggaaatgtgaagtttcataccatcaaggaatgggaacccaacacaagaacgtggaatttaaaattgaacattacagaaaaaacatctccaaatcgatctacaccctcttatatatttaaagatggtagtactaatctctaaggcaacaaactga

SEQ ID NO: 14709 - DNA, 374 bp, Glycine max
  misc_feature (113)..(114): n is a, c, g, or t
  Coding DNA Sequence Number=SeqID_4930
gtacagggtcacaactctttaggcttctactccatctctaatatttagtcttagtagagtgagatttctcttcaacaataggaatatctagtttgatacaagttaacggtganntttaattataagaaaatttcgctagggtatagctgacgctctctttaaattccagatcgcgcccgaccacacacccacaaaattcaattcgattaagagagcatacttttactctttaatatgagaatagatattttcttccgcttaacaggtgtaactttatatcttgttttagttaccagacgagagaaagtctcttctctatctctaaattgtacaattaaagactatgtgggtgttgcaccaactcgaaaccatat

SEQ ID NO: 14710 - DNA, 577 bp, Glycine max
  misc_feature (331)..(331): n is a, c, g, or t
  misc_feature (538)..(538): n is a, c, g, or t
  Coding DNA Sequence Number=SeqID_4931
acaccaactgttcgctctatttaataatccccccaccgtatttatcgggctggtattattagggggtgcggcggagcgaggagggagtgagaggggggtgagcctcagcggcatgaagagagatagaggatttgtatgttcatgcgagtgggaggtgcgaccggtgatcggatcctaatgctggctccgcgagtgtgccacgccgctcaccaaagacgagacgagcaccgaatcaatgtcgtgtcccagggtaaggtatgcatacaggagcgcgtggttccgccgccgctcagcgggtggccgcaccacccgcgctgaagcgtgatctaanataatgcgggcgcggccactacccagccttaccagtgctccacagtgaaacaccaacattccacatccgggcgcacgcgcacccgtaatactacccatactactaacgctatacaatcattgatcaatcgctcctaagatctctttactttccgctctccactcaccacgcagcggtagtcgagactgtcagtgggatgtaccgtgntggtgtagtcggtgggtcgcgtttgttagcggtctatat

SEQ ID NO: 14711 - DNA, 490 bp, Glycine max
  misc_feature (358)..(358): n is a, c, g, or t
  misc_feature (454)..(454): n is a, c, g, or t
  Coding DNA Sequence Number=SeqID_4932
gcgccaccgcagaacagcacggaaagcataccgcagccaagacacagccgagaggagatactaatccaatatcaataaatagtataatatcactaattaaatagcgacagcaccacaccaagcgcaggccgtcgagcgcacgggcgacgcgcacccgccctagcagagacacagcgccggcgccgtacagagagtgataatgagtgtttctatatcttcccatatagcatctgtgggtcttgtgtcccctcccctcgcgtacgacattccggcgctcgaattggtctaatagacgcgaaatccgcgtctattctgctacatttctcccccgccatcctattcttcacctgcgcgtgantatgagagtattaggtgaaggtgagagtgttacattcgttcattaaaattacccctcaccagatacgcatcgaccgccaacgtctacttccactantacgccgcacagccgccgagacaactagctgatatt

SEQ ID NO: 14712 - DNA, 348 bp, Glycine max
  Coding DNA Sequence Number=SeqID_4933
aagtacaggttctaactggacacaatcaaactggctctttccagactcaccctaacatgaataaagaattttctgccaatgattatatacttggcctaaaacatcccaacaggcctcttcccactggcaaagcaagtgatgcagcaggtgttgatttttctacttgtataatgcatactactgattacttaatattgtcttttactatcatctgctggacttgttcttctggaaaccaaacttatgtctgcattgaatatgaggctatatcaatgtaggatctgaataatggtgtgatcttactacctcttccatctcttctagaagctccatactgtatgcacactg

SEQ ID NO: 14713 - DNA, 226 bp, Glycine max
  Coding DNA Sequence Number=SeqID_4934
tcagacaggaatctgacggccccaaccctgatggatcataccgctatgcttttgacactgagaatggtatccatggagaggagtctggacagctgctgaacgctggatcagaagctgaggccatcgccgtacaaggcgccagcagctacacgtctccggagggtcaagtaatcaacttgcagtacactgcaggcgagcagggcttcgtccccgtaggtgatcacct

SEQ ID NO: 14714 - DNA, 288 bp, Glycine max
  Coding DNA Sequence Number=SeqID_4935
aatggttgctggatgggactccatcgtgaccctgatgtgtaggcgagaacattgaaaaagctcttacgtcatgctgtcgtaaacactgaggggggagggggatgagatatccgccgacaaaaattgcgtatatatacaggctgtggacgctgcagacgtgctttgttcattgaggctacgcattagctttttataaggaataccgacatacctgctttacagacggatggcgatccagcggccactgccagtcatctctgtaggttgcggaatcaccgagcgcatgct

SEQ ID NO: 14715 - DNA, 483 bp, Glycine max
  misc_feature (124)..(124): n is a, c, g, or t
  misc_feature (126)..(126): n is a, c, g, or t
  Coding DNA Sequence Number=SeqID_4936
aatgaatggtgatcgcggtcggctctcgtcgttcttgcaggttaagcgaacagaccatagcacgagcacgtgtgatacaacataattataatatgcaatgaattccgaggacaacgaaggagangnaagaagatgacagtgaaaggggagcacgcgagacgctcgagaatagcaaactcacagatggagatttagtagttgcaatgagagagcagaaacaagaatgcacaatagaaacatacgtaccgccgaccaaggatatatgtcctcaccttgtaccttcgttttgccaccatacacacaatatgaagagaacgcgtactgctatatgattatattagtatgccgtacgattgcgcacaacaacggagcagaaaacaagtaatcatgaccaacgtgcgcgcacgggtacgccgaaacgcaagtgttagaggcgcgtcctccgcttctctgcgggcccagctgttgtgtttgtccgctagg

SEQ ID NO: 14716 - DNA, 486 bp, Glycine max
  misc_feature (237)..(237): n is a, c, g, or t
  misc_feature (250)..(250): n is a, c, g, or t
  misc_feature (256)..(256): n is a, c, g, or t
  misc_feature (264)..(264): n is a, c, g, or t
  misc_feature (268)..(268): n is a, c, g, or t
  misc_feature (274)..(274): n is a, c, g, or t
  misc_feature (319)..(319): n is a, c, g, or t
  misc_feature (340)..(341): n is a, c, g, or t
  misc_feature (373)..(373): n is a, c, g, or t
  misc_feature (379)..(379): n is a, c, g, or t
  Coding DNA Sequence Number=SeqID_4937
tactatggtcttgccgcgcgttgagaggcgtgcggcgcgcgagcgcgggtgacgtagggtggtgggcggagtgctgagtagtgaaagtggagatctgagaggacattatgatatagtgaagccgagtgtcgaacttcgtgcgtaccgacatacagaccgtgcgtcacactgtgaccgtatgttgtgacttatgacggcacgcgcgacacggacatgaggtatatactcgcgcgacantacgatagcgcgncacacntcgtggantgantcgttnttacatctctcagcgcctacgctcagaggtcgagcgcggagaggnagcaggctgagggggtccatnnacagcggagagagctagtgtgtgaggtaggcntgcgtnggtcgtgacatcgtgcgcacacagtgagcggtacacgtcagcgtagcgtgggtcgcgcgctatcttcgacctggtagggacagacgacggtgtacccactcgagtgt

SEQ ID NO: 14717 - DNA, 367 bp, Glycine max
  Coding DNA Sequence Number=SeqID_4938
ttttttcaatcggatcgcgaagatgatagatatcagtcgagtccagaaagagctccaagattgcgagaaagacagagactcctcgggcatccgggtctgcccgaaatccgataaccttacccgactcaccggaaccatcccgggtccaatcggaactccttacgaaggcggaacctttcagatcgatatcaccattccagaagggtatccctttgagcctccaaagatgcaattttcaaccaaagtttggcacccgaacatcagtagccaaagcggggcaatatgcttggatgtcttgaaagaccagtggagtccagctcttactttgaagaccgctcttgtttcagtccaggcattactctctgca

SEQ ID NO: 14718 - DNA, 567 bp, Glycine max
  misc_feature (527)..(527): n is a, c, g, or t
  misc_feature (538)..(538): n is a, c, g, or t
  misc_feature (540)..(540): n is a, c, g, or t
  misc_feature (542)..(542): n is a, c, g, or t
  Coding DNA Sequence Number=SeqID_4939
gggtgtcaaacgagattctcctatgctaaaacctgcagagagctacttaagattgagatcgttcggggcaccagcagtacttctctccttggccatgcaaggcatctttcgagggttcaaggatacaacaactcctttatatgtcatcgtttcgggatatgcattgaatgtcatattggacccaatttttattttcacattgaagttaggcatcaaaggtgcagccattgcacatgttctctcccagtacatgatggcattcactctcttattgatattaatgaaaaaagtgcatctcctacctccaagaataaaggatttacagattttccgatttcttaaaaatggaggattgttgatgctaagggtaatagcagtcacattttgtgttaccttagcacatcattggctgcaggctaggtcaattcccatggctgcatttcaaacatgcctacaggctggtgacatcgtccttcttgcaatggttggctgtgtgtcagcaatctactggtctttatggaaaactntagaaacacancncncacaggccctcaatgatttgttgga

SEQ ID NO: 14719 - DNA, 538 bp, Glycine max
  misc_feature (43)..(43): n is a, c, g, or t
  misc_feature (50)..(50): n is a, c, g, or t
  misc_feature (223)..(223): n is a, c, g, or t
  misc_feature (232)..(232): n is a, c, g, or t
  misc_feature (273)..(273): n is a, c, g, or t
  misc_feature (277)..(278): n is a, c, g, or t
  misc_feature (280)..(280): n is a, c, g, or t
  misc_feature (302)..(302): n is a, c, g, or t
  misc_feature (379)..(379): n is a, c, g, or t
  misc_feature (432)..(432): n is a, c, g, or t
  Coding DNA Sequence Number=SeqID_4940
tatcacgtatcggatgcactcgctcgcgcgttctcgacgccgnaaaatancgcggtggtcgtaacataacaacagcgcgaccttctttcgtgtctctcgcgcgctggtatcatctccacatcacatacacatcacaatactgacatcgagcgtacgccgagcagcagcacggcgggcggtggtgtcgtgttcgtgcgctgttcgtggcagtcctgcgcccagncggactcgncgagcaacgcgtgcatgatagacaagggagaaggatgtgantagnnanaagcagtattggtacggagtanctttgacagatgcaatcagtcagcagagaggcgtatgtagtgcgttggcatgatattagtgtgcggtttgtggtttntcgttcgtcgtctctgtgcgaggtgcaccgcgcacgccgtacatggcgtatgngagggtttagttgtgtggtgtgattatataataatgttctgtctgtcgtgtgcagagggtagtgcatcgtcgtggtctgcgttagctgtagtaagcgtccgcttct

SEQ ID NO: 14720 - DNA, 531 bp, Glycine max
  Coding DNA Sequence Number=SeqID_4941
tatcctgtagagtttggtggcatcatcagatactcctgttgttgtcaacgagggttagtaggctgctccggagaagagcagcagcagctgtcaagaagcataatctgtggtgatgcacgatgatgatcgtattttaggagcagcgtcagcagaagaggtcatccatcattgggcgtcttcttctccaagaagatcatcaagaagggaggtgatgctcctcatagtcagcagtgggaggagctggagtaatgggggggattatgatgattattgttcatcagcccgaggaatatcatcaagaggaggcttcagaagagaagtaagtatcatgtagggtgggaggaggaacaatgatggtgaagaataatagggggaggaggcgtcttttccccatcataggcagtagtagaggaaatagttgttcgtggtaggattctccacccaacaatgatatgatgggaggatattgtggtggggggcatcatttgattattctgtgaagaatataatagtggttgttggctgctcttc

SEQ ID NO: 14721 - DNA, 432 bp, Glycine max
  Coding DNA Sequence Number=SeqID_4942
gatgatatactatcgatcagtacaatctattttttttaaataataatattgaattttttcatcgtcattgtttagtttataatagctcttttttctgtcattatatcacatcttacatttatcacttttttttatctctcccttctctaaaagtatatatataaatccttgaccaatgtgagaaaatagtttttttaaactaaaaatagtatatatagtttagttttaaagttagaactttaaaaaaaaaaattacggtgtagattgacttcctgaaagttgactatgcttttgtaaaactaatttttggcaacatttaacagtagggaaaattgggcgtataaaaattactagaaaattaatggtcaaaattggcagaaattgatttcacataagcaaaatcgactttcaagaagtggatttgcaactgca

SEQ ID NO: 14722 - DNA, 528 bp, Glycine max
  misc_feature (31)..(31): n is a, c, g, or t
  misc_feature (156)..(156): n is a, c, g, or t
  misc_feature (266)..(266): n is a, c, g, or t
  misc_feature (380)..(380): n is a, c, g, or t
  misc_feature (397)..(397): n is a, c, g, or t
  misc_feature (465)..(465): n is a, c, g, or t
  Coding DNA Sequence Number=SeqID_4943
atactctactccatatgtaccttgcgcctancaaagagacaacaggcatcgcgacggcgcctatgtatcccgtgtgtaaacgtcacgtgaagcgtctagcgtgttcactaggctcattactactatagctctctttagtgtatacactagcagcancgcgcaggccgaatgggatcaccaccaacaatgtacgcgcgtgtgatgtactaagatctaactgacatgacatgcgtggtctactatgaatcccactgtctatgacagangctacactactcatcactatgtcacagtgctagggctccggcgtagccactaaggatatgtagtaatctatctggcccatacaagagcctccgtgtaagaaatctcacacacangcatgggacaggtgtgngccaagcagcatgtacacatgcgcacgtctcctcgcgctcgtggctacgcggaggtagaatccgctanctaagtctgcctaagtaccgctcaccgcggcccagagaaaggaagggtaggacgctctcacga

SEQ ID NO: 14723 - DNA, 600 bp, Glycine max
  misc_feature (34)..(34): n is a, c, g, or t
  misc_feature (44)..(44): n is a, c, g, or t
  misc_feature (77)..(77): n is a, c, g, or t
  misc_feature (90)..(90): n is a, c, g, or t
  misc_feature (109)..(109): n is a, c, g, or t
  misc_feature (113)..(113): n is a, c, g, or t
  misc_feature (180)..(180): n is a, c, g, or t
  misc_feature (186)..(186): n is a, c, g, or t
  Coding DNA Sequence Number=SeqID_4944
tgatgcgcccaaccattaaatcttcagtttgganccaaccacanccttgcaaatgtggtccttcatccaaggtcatntccatgatttagnatccgccatccacagtcgncagnaatgagggatcatcactccatatggttatggagcatccaccattaccggccgaccccaactgccaantcatgntggggatatggtgcctttgacacatcagaccctgcaaataactccacatcaacaaataccaataacacagcaagccccgcacctcctactttccgaccacttcaaccaccaggaatggtgtactatactaatcatcagcattcgatacatgctaccctgggacgggagctggcaaatgttggaagcaagactatcacatccctgggacgtgaaactctcttgcccaatattttaactgagttactgattcagtcgaccgaccctaatgcgaacggggatctcatgaaccaggcactgataccatcacccccccaaaaagcaaaaaacaaaagcaatagaagaacatgataagaatgaaataaacaagtgttttgccggaaaacttttaatataatgtccttataattggccaat

SEQ ID NO: 14724 - DNA, 543 bp, Glycine max
  misc_feature (232)..(232): n is a, c, g, or t
  misc_feature (234)..(234): n is a, c, g, or t
  misc_feature (433)..(433): n is a, c, g, or t
  Coding DNA Sequence Number=SeqID_4945
atgtttgctcgtacatgtgccctcatcatatatatctagcatgagcacgcggtgaacaaggaattgccccatcattctaacatactatgctggtatgcccctatccacaccgcagagcagcaagtgtcagcttatgacattaagccaggggtgagtgtaatgcaccgcagctgacgcgagctaaccaatgacacgatacattcatgaataacttgaacagcaggctgtggtngntgcgggctcagacaagcatcgttcaagtctgacccgagtgagtcgctcatgccccaatgtgaggtgcatcatatatattgactcaaagactcgtgcgttatctacgttgaggggtcaacttcatataaataaatgcctacctatatacaagatacttcatctactcagcagatccatttcagaaaatcgtcttgcattnagcgttgcctcattacaaacccacagacagatatacgtcaacttataccacccattagcctgtgtctccattgttggggtgccccgctatctaccttacagcgagtggtg

SEQ ID NO: 14725 - DNA, 583 bp, Glycine max
  misc_feature (186)..(186): n is a, c, g, or t
  misc_feature (250)..(250): n is a, c, g, or t
  misc_feature (305)..(305): n is a, c, g, or t
  misc_feature (433)..(433): n is a, c, g, or t
  misc_feature (520)..(520): n is a, c, g, or t
  Coding DNA Sequence Number=SeqID_4946
aatatgatgtgctataggctgcggagcgcgctcgacccgaccccatctctcatgcatcatcaccactatctacatgacactatacttgatcagtgtatgatagcgaatcctctgtacagccacaccgtcaacactcccgcatctcagctcatcccactattacgctcatctcgccgtctcctgcancgcaacgtcctcctgatatctcgtctcaacatcgctcgagtattcacctgtgctgtgctcagtnataacttctctccatctgcttcactctcgatcacaccaccacgacacgctgtcantccgcgcagtaccgtacactgcgtcgacactagtcatctcatcacaacacactgacgtcgcgccacttcacgctactactactcatcctaactcagactcatcacactatacatcactcattaactcntatactatcactagatataatctcactatattactatatagcactatctatgactatactatcatatactcgatcatacacactccnacgctcactctgactgctgcgcagtgcttcgatatcgcactgactctaagctatctactctca

SEQ ID NO: 14726 - DNA, 406 bp, Glycine max
  Coding DNA Sequence Number=SeqID_4947
tctatttcatttgataagcccttgtttataaactttttaaacttcaaacatcttttggtgactttaaaggttcatttctttcagaagcgaaacaaggtccagatgaaaacatagcctttagtactccctttttcttcagctgtttatgcatttttcctttctcttttagcattacttcatgtttgtcttgccattgaattttactacccctatttcctgcctcttgcttctttccttcacctttctcactgttatccaatgctccattaatgcctgctgacattaccataaaattcctgagctgaaggtccttttgagcttgtttttgctatattaggagtttcaggcttccatattttcttcttagggtcgacactttcagctaaagtagtacgagctgctataa

SEQ ID NO: 14727 - DNA, 378 bp, Glycine max
  Coding DNA Sequence Number=SeqID_4948
gtgatgaactacatcttctccgtaatcaacaaccgctccattgctcatgaggctcgtgggggtgatgtgaatgctctcaatcgtctcatttacaatcagacacgtgcatgcgctaatatcttttggacacccttattgacgtcacagaaactgcgctgatcatgctcggagataccactgttactcgttatggacggtggcccatactgcttgatacacatggactgacgctctatatatctgatgggttatgcttcaacatagcatggcaaagccctcgagaggaacacgatgaatgttgatgctgatattaccattgccataggaacattgttcccaatgtgtggtgttaatgtggcgtaagatcgtcagctgatt

SEQ ID NO: 14728 - DNA, 576 bp, Glycine max
  misc_feature (108)..(108): n is a, c, g, or t
  misc_feature (110)..(110): n is a, c, g, or t
  misc_feature (174)..(174): n is a, c, g, or t
  misc_feature (278)..(278): n is a, c, g, or t
  Coding DNA Sequence Number=SeqID_4949
tgtcgctgcggaactgctactgatggagagaggactcaggctgcttatttaatgaacttcactggaggtgtacgtcgaagaccactcccggagaggctaagaaacagnanaggctgtgcgtctcaggtggggtcatcctgactctgctatactagagatacgtggggtcccatncaggatcttagatccggcgacagagttccatggcgtagagtcgcacaagggcaagagttgcgtaatacgcttcgtactaaacgtgtgcagagggagggctgcanggtagcattagtatggggatgtcctacagcatcgagacctctctctgcgcttgacatacatgcaacacacctagaggctcaatagtatggagactagaccataagaagcggtcctgaccgctagccctctgcatagagcatgaaggagaaagtactccattctgaggggctacctaatacttagttgaggagatctctgcgacactctcgcggcgggctcgcgcgggagatatcctaatatgttgcggcgccgcgccccgcgtggagggtccgcgacttttccggctttgggtatgtg

SEQ ID NO: 14729 - DNA, 546 bp, Glycine max
  misc_feature (349)..(349): n is a, c, g, or t
  misc_feature (450)..(450): n is a, c, g, or t
  misc_feature (463)..(463): n is a, c, g, or t
  misc_feature (478)..(478): n is a, c, g, or t
  Coding DNA Sequence Number=SeqID_4950
actttcatccgtccagaagaacatcacacaccataatacacatcctccttgcgtccgagcgcacagcctacctcatgaacgctggacataacatacctgtctactgagtataacgtatagtttgacacctgtgattattaatacactcgatcgacatataataatttatatagcccgtgtgacgatcgcgtcatattacttttcttatatattctctcttccatcctcctattcgttgtctcctattattactatactatgtacaacactcagagtcgcgaatcaatacacatgactctcctgatcgctacagaacgacgatctacccacaccgctctcactcaaatantccttgctcactctcgttctctgtcgtggtactgtctactataggaagacaaggaaggttatagttcgggagacaagttatgtcagatatcgtgagtcctnctcgttcccacgntcgacatgatctatnccgaacatacattacagaattcacgatgtactagtagcgtcacgattattcagtcgaatgcacacatt

SEQ ID NO: 14730 - DNA, 211 bp, Glycine max
  Coding DNA Sequence Number=SeqID_4951
tagctctcctggacatgaaaggacgagatattgtctcacatccaagattgcacttggagtgatgttagccatgtcaccttttaactatcccgttcatcttgctgtttccaaaattgctcctgcgctgattgctggagactgcatcgtgctcacgccgtcaactcagagagctgctactgctcgtcatatgttcactgctttcatcggctgg

SEQ ID NO: 14731 - DNA, 536 bp, Glycine max
  misc_feature (213)..(213): n is a, c, g, or t
  misc_feature (293)..(293): n is a, c, g, or t
  Coding DNA Sequence Number=SeqID_4952
accagtcttcgacggagagcgcataattaccgcgctattcactctgaccagtactgatgaagtaggtgcacatctatttttcgtccaatgaataaaacaataaggtgtgtatagtcaggttaagacccgctaacgtctatgggtggagggatggcacagccgagatcttaatgcccgctcgcctatatactcgcggcgagcgcattaatcttnactcgactgtacacgcgagctagtattcatcgtagtatacgtaatcgctgaagcgcgcaacatatcaacatgagcatacnataagagaatatctttgagtctcacgctttgtatattgcgggtacctatcatattcttgagcggagagcgggagcggtcagatgtgaaggtatcatggtacgcaacttatccacacgcttgatatgtggtggggtatgtgcgcacaataatagacatcacatctctcttcccacatgagagtaggcgcctcacaatatcaccaaattaatgtttagcattgatagtgctttcgtgctcagaca

SEQ ID NO: 14732 - DNA, 103 bp, Glycine max
  Coding DNA Sequence Number=SeqID_4953
atgcatatggtgcagaggagccatcagctagcatcagagcggtatagttccattctgcaagcatcttgtcgtcatccttcaggcccagtatgcccctcggaga

SEQ ID NO: 14733 - DNA, 579 bp, Glycine max
  misc_feature (83)..(83): n is a, c, g, or t
  misc_feature (168)..(168): n is a, c, g, or t
  misc_feature (170)..(170): n is a, c, g, or t
  misc_feature (200)..(200): n is a, c, g, or t
  misc_feature (249)..(249): n is a, c, g, or t
  misc_feature (275)..(275): n is a, c, g, or t
  misc_feature (287)..(287): n is a, c, g, or t
  misc_feature (345)..(345): n is a, c, g, or t
  misc_feature (357)..(357): n is a, c, g, or t
  misc_feature (484)..(484): n is a, c, g, or t
  misc_feature (516)..(516): n is a, c, g, or t
  misc_feature (535)..(535): n is a, c, g, or t
  misc_feature (545)..(545): n is a, c, g, or t
  misc_feature (548)..(548): n is a, c, g, or t
  misc_feature (553)..(553): n is a, c, g, or t
  Coding DNA Sequence Number=SeqID_4954
atgactcttgaacgagatgctactattcgtacgagtgagcgcgtgcataccgtcgactctgccagacatcctacggcagagantaactcctctatctactacctccactcctatcgcactgcgtatgaaacaatctatagtcacgccacctttagtcgcagccagtcncnactctatacattagtgagacgcacttcctncgctctctgttcattctctgtctgtctccgcgcgtattttagtgtaccngctataacatatactactcgttcgcnacacactactanaccctctcttacgtatcgtatcgatgatcttgtgatcgtatatgatacatagctacantcgttctgccancacacgactcctatcgcaccgtctatctacatgttgtgagtgcgtcgactgcaactcatctctgacacacacctgcgtcgacagatgatgcgatatgtactgtgctctgtactgatctgacatcaanactctcatctacctctctgactttgtatctgntgagctgactccctccccnctatgacgantcnacagntactatgtacgtctgatacgtccggt

SEQ ID NO: 14734 - DNA, 546 bp, Glycine max
  Coding DNA Sequence Number=SeqID_4955
tagccggcggttttattcagttgaggggagggaagagattatatatacccgagcgcggggatggtatgatatgattaggcgcggagatataaccaaggctgcgtggagaaaatagaacaagtagagcgggttgtgggcgagagacgtgatccgtggatggatatcattattcctttatcttcccaatgcgcgcgctggcgcggggagcgacttataaacagcggggcggggtatcacatagtcgcgggtggggggggagagcggggcgacaccaaacgccctacggttaatggccggcgatgcctagccgatcagagaacagccgcaacaaaaataataaggcggagcaagggatatataaaggacatggggtgctagaagggaggggcgggcatgtttgtaaatgttgatgccggatacatttggtggggtaattttgtggccaaaggagggatgcccgagtgatctggttggtgggccgatctaaagattacttacatcaagttgcggggtgggacaaaaataaatattaacatcctcgccctc

SEQ ID NO: 14735 - DNA, 556 bp, Glycine max
  Coding DNA Sequence Number=SeqID_4956
gattccgaaggagaacatctacgcaatcgacaaacaatgtgccgctgatggtgacgcggagcgttgtgcgacgctctacgaggagtgcttgaggaacctggtgaaggaaaagatactcccactatgtccaaatggccaatttcctcagttcgatctccagctccaagggatgggtcctgatggccacatggcgtctctcttcccggaacgtcctcagatcaatgtgacggacaaatgggtcactcacattaccgactccccaaaaccgccaccaaggagaatcacattgactttaccggtcatcaactcgtctttgtacaatcttgtggccgtttgcgacgacaacacagagcaatgtgcacgctccatcgctgatatctttaagcacaacaatctcgccttacctgctgctcatcttactgcccaagtcgaacaaatgtggtaccttgacaaagcagctgcttcattgctttagagagctaaacacattaataaatggtgtcctttatatgaataataaaataatctctccaagtcatgctttgtggagcgtgtt

SEQ ID NO: 14736 - DNA, 513 bp, Glycine max
  misc_feature (139)..(139): n is a, c, g, or t
  misc_feature (373)..(373): n is a, c, g, or t
  Coding DNA Sequence Number=SeqID_4957
gtcgcccgcccttctcgtcgtctctctccgcccctccacctccactcgccgccgctccggcacgcaccccgccttcctccacctcaccctcgccccgccccgtcggtccccggcgcgtgccccgacgctgcgtatatcncatctccccccctccccgcgcgggctcgcccagcctactaccacgcggtctctctttctctccccccccgctcctcctctccccgataactcgcccgcccaccgcggcgcccaccctcctctccccctctctatcgctctctccgtaggcctctccttgcacgccccccgccgcccgccctccgcccgctccccacgcgccctccgccaccggcgcgcccgccgccgtgggagnacgcccccaccccctccccacctctcccgcgcccctcgcgcgccgcacacccacacgccgcgcgtgcggcccacacctcctctctccgagccacctcctcgcctctccccgccgcgcgtcttcctgaccgccttacccgc

SEQ ID NO: 14737 - DNA, 234 bp, Glycine max
  Coding DNA Sequence Number=SeqID_4958
gtgaatcatgagttaggattccaatattagggcttgttccctcgatgattctaccgtaagcaaccataatatttgtttcgtcaaaagaaaatgagtgttctccattgtaccttcttctattattctcaatatacaaattttattctttgctctgcacaaactttcaacttctcctcactggcacaagaatataaatcgagtgattgaatacaggcccatgaccgagtcagctac

SEQ ID NO: 14738 - DNA, 569 bp, Glycine max
  misc_feature (175)..(178): n is a, c, g, or t
  misc_feature (180)..(180): n is a, c, g, or t
  misc_feature (182)..(182): n is a, c, g, or t
  misc_feature (260)..(260): n is a, c, g, or t
  misc_feature (311)..(311): n is a, c, g, or t
  misc_feature (314)..(314): n is a, c, g, or t
  misc_feature (324)..(325): n is a, c, g, or t
  misc_feature (407)..(407): n is a, c, g, or t
  misc_feature (434)..(434): n is a, c, g, or t
  misc_feature (505)..(505): n is a, c, g, or t
  misc_feature (511)..(512): n is a, c, g, or t
  misc_feature (518)..(518): n is a, c, g, or t
  misc_feature (520)..(520): n is a, c, g, or t
  Coding DNA Sequence Number=SeqID_4959
ccccgcgccagtagtgtggaaatacgacacgagataaagtaaatgaataccgtccgttttttatttattgtactatgatgtctaatattctgcatctgccgcgccctcaaagcgaggaacagatgatataaataacgcaatccatgatagtattgtcaatagcgtgactgcatannnntncnctagttgttaactcaaaaagaacgtccgcgcctatactatatgcaccccgcctaataaacatatacgcaccccatcancctgatatacatgtcgtacccgccacgatgatatatgctacccataaaagnagnggctcagaanncgctttacgtggacgcaccccacggtaagggaccgcccgtcgaatagaacgatttctcttttgtgtcctactagtatgtcgntgcgtccctcgctgtgtgtttgtgagnaagcttcttccgctgttcgtgtcctacagtcacggtttgttataacagagttctgtgataatagtaggggngtgcgnngtaatngngtttatgtggtggcaggggctcgggcgacgccgcggtatagccttaagg

SEQ ID NO: 14739 - DNA, 376 bp, Glycine max
  Coding DNA Sequence Number=SeqID_4960
gcaagagactttattatacatatacatatataacaactttaacaatgtatatttggaacatttaatcccaaaaattgaccatatccccatatcatatttatattagttgaaatatacccatgtgcttcttagagcgtgcatcaaaatttgagatttcacattagctctgtcagcatagtcatctacaagggtacacatgcatcaaatttatctaaaattgattccggagaatgatagtatgttaaacttacaagtatctcctcatcgagataagaaatcatgaagagtctttgaaagctcccaccttcaaatatgagaaaatttagtgtttttcacattgaaatttgaataaaggagcaaattgtatacacacttg

SEQ ID NO: 14740 - DNA, 125 bp, Glycine max
  Coding DNA Sequence Number=SeqID_4961
gggcactgaaatttcccttcgtgcatgtcattgtcatctttgaggcttcttttctgaatcactccatggttcgcttgtgtaaccaaactggcagaatttgaggttcctgagtgatcttcgtcctg

SEQ ID NO: 14741 - DNA, 246 bp, Glycine max
  Coding DNA Sequence Number=SeqID_4962
accaccaatcaaaaaagctgcggttactgatgtgggttgtgtttggaacgattcccacaccggtactgctggctgcaatgcacggaaagatcgcctgtgtggaaaagctccttgaagccggtgcaaatgtactaatgtttgatgcttgttaccgaagaacctgcttgcacttatgcccatattttggacattcctgttgacataaggcagatttttctggcgctcaattcagatcattggctgctt

SEQ ID NO: 14742 - DNA, 367 bp, Glycine max
  Coding DNA Sequence Number=SeqID_4963
acggagaccggcgtcgagcaagcaggcggctaattatactaagcggccacagatgatctgttgtctcatatcatacattacagcacattgagactggagattatactgtgcaagaaccatctcttttaccaacaaacacctctcaaaatttaaaacttcaacgcgcatggaggaatcattgttgctttcaactgtcaaggggctggttgggaccctaagatgaaaaacatcaagggtttctctgaatgctacaggccaatttattgtactgtgcatgtaactgaggttgaattggaccacaagaaagaagcagttcacatgggtaaggcacaggagtatgtcctgtatcttaatcaagctgaggaac

SEQ ID NO: 14743 - DNA, 548 bp, Glycine max
  misc_feature (74)..(74): n is a, c, g, or t
  misc_feature (98)..(98): n is a, c, g, or t
  misc_feature (298)..(298): n is a, c, g, or t
  misc_feature (339)..(339): n is a, c, g, or t
  misc_feature (369)..(369): n is a, c, g, or t
  misc_feature (379)..(379): n is a, c, g, or t
  misc_feature (418)..(418): n is a, c, g, or t
  misc_feature (448)..(448): n is a, c, g, or t
  misc_feature (495)..(495): n is a, c, g, or t
  misc_feature (512)..(512): n is a, c, g, or t
  misc_feature (520)..(520): n is a, c, g, or t
  Coding DNA Sequence Number=SeqID_4964
gaagaactagcacgccggcacacctgatgctctcatgttgtgctatgaacatatcgtcgcatctgtgtgctcgnggcctctcactctcgtgtgacacnagtctcgctgactcccctatcactgtagaagagtcggatagctatacatgtgctctcgctcctctctctatgtctgtctcttgtcgcatctacccgcatttcgcagtaggccgccactcacgacacgttatgacaaccagctcagcgtagctagtgtgtgagtatgacttgtgctctgcaacagatgatggcagtcacgngagcgatcgtgtcttgtagttgtatgtgcgtgtaactgtangatgacgacgacgagcttggactcacatcnctaatatacnctatactgagacacacgcacacatatcatgctatgatgnaaactacacaataatcattactagagagtnctgcttgatgctatggttgcactcgttgtagcgatccttcagtgatntgcgttcgtctgcgaancaggagantgctacagatatctagatcaggtcgact

SEQ ID NO: 14744 - DNA, 508 bp, Glycine max
  misc_feature (48)..(48): n is a, c, g, or t
  misc_feature (58)..(58): n is a, c, g, or t
  misc_feature (210)..(210): n is a, c, g, or t
  misc_feature (254)..(254): n is a, c, g, or t
  misc_feature (291)..(291): n is a, c, g, or t
  misc_feature (327)..(327): n is a, c, g, or t
  misc_feature (349)..(349): n is a, c, g, or t
  misc_feature (364)..(364): n is a, c, g, or t
  misc_feature (376)..(376): n is a, c, g, or t
  misc_feature (386)..(386): n is a, c, g, or t
  misc_feature (405)..(405): n is a, c, g, or t
  misc_feature (451)..(451): n is a, c, g, or t
  Coding DNA Sequence Number=SeqID_4965
tacggcacgcttactcatacatctacatcgacgcgccgcatgaacacnagatgtgtgnatgactcgtgagttgtcacgtgttgctcgtgcgcgctgcctcgcgccgtgcctcactcgtaattagacctcactctgacgctgacagcacatgtacatacacactaatcatgatcgctacactctcaatcacttatatcgacgcgacatacncatcgacattacacacacgcctactctatcgtctccagatgcantgcgtatccgacgtagtatcccataacattcatgctngtgtagcggagtagcgccggcgcgtccgcgccacantaccccatgctcgtctagactntcatcgcagcccgcngtgaacacgaanctccgactcntcatactcatctgagcatntagaggtagctcacactcaacatgctctcatactgtataagcgacnactacgatcctagtggatgtatacagcgacgcagtccgtcatacgacgtgcagcgag

SEQ ID NO: 14745 - DNA, 546 bp, Glycine max
  Coding DNA Sequence Number=SeqID_4966
tggacgacaagctattccctgcttacgctggcactgctaaggcagccacggaggaggagaggacgcaacagattaacgagatgttcgcggtgatggggcagctggaggaggcatttgcccagtgctcaaacgggaaggccttcttcgccggcgactccatcggcaacctcgacatcgccgttggatgcaatctgctcttgctcgaggtgctacgcagtatgtatggcgtggagttcgtcgacactgggaggaccccgctcttggcagcgtgggcgaagcggttcggggaaaccgatgcggcgagggaggtggtgcccgacgtgcacgtcgccgtggagtacgccaagaagcgtcaggcttattgggctgctgccgcggctacaaagtgacatgattcagatcagatcagtccgagtactacggactgaaaattatctcaagtccataggatgttgctccaacaataaagaggacaaatcatggatacaccatcttaaacatgatgattaacttacctcacggggttatccaacaatcgctgattta

SEQ ID NO: 14746 - DNA, 230 bp, Glycine max
  Coding DNA Sequence Number=SeqID_4967
atagaatacttcataatcccctgccagactgatgattcagggggcagcacaggtgttgttgtatatggaagggtacgccacctgatagacgcttatcttctatccgagaaaggactccccccagacttagatagatcttatatcacacatgtttctgggagacccccggattacaatccatgtgaggagctggacaacctgcgcctgcttgcacgtacattggtgctgga

SEQ ID NO: 14747 - DNA, 199 bp, Glycine max
  Coding DNA Sequence Number=SeqID_4968
ccccatggagaagccagtaaagtgacggatgaaagtgtattatgtgcagttccttgcttacccaaaattggatcttctaatgatgtcaagaagatgaagtttaatgcaggcagtggacgaagtaagagattgagccctactagcaatgtgcttagtggaagacacatccatactcaacatgatgaaacatttctcttca

SEQ ID NO: 14748 - DNA, 341 bp, Glycine max
  Coding DNA Sequence Number=SeqID_4969
gtcgacggagatcgcttccgtctcttctccggtgatctcgcctctcgttcagaacccatcagctgaactggaggtgacgacgaaaaacgttccggcgacgttgactccgccgccgtcgcagacgacgacggaggacaagcagctgaaacgaccgaatcgctgcacgacgtgcaggaaacgggtcgggttaaccgggtttaagtgccggtgcgggacgactttctgcggtgtccacaggtacccggaggtccacggatgcacctttgacttcaaatcggctggtcgtgaagagatcgcgaaggcgaacccgttggtcaaagcggcgaagcttcagaagattt

SEQ ID NO: 14749 - DNA, 392 bp, Glycine max
  Coding DNA Sequence Number=SeqID_4970
ccaagattgggtgtttcccctgattggccttaacacactccggggaaccgcaagcgcatttcccgttttcgccaatccaccacaaagggaaaatcttcaatccggctttagcataaacaagcgcgaattctgattttgtcattttgccgccaatccagtaaacgtaatttcgattccgtacatcttaccgatttctcgtaatgcggcaaaatattttttatgggggtgtatacccgtcgaggtgtaccagtagttgataacagactggtcaaagtctggaaaacccatatctcttaggtgtttagccaccgtgccgggcgattgcatatgctggataagtttatcaaattccgccgttaccatgattcatccgttgacgttgacaatgtttt

SEQ ID NO: 14750 - DNA, 456 bp, Glycine max
  Coding DNA Sequence Number=SeqID_4971
atggctcagcggaagacgacaaggaaaggagtcgcaaacgagaggagactgcgacggagcaagctaagaagaaggagaataaagaaccaagcggcggcggaggaggagaagcggaaacggatgtgaatgagatagagatgatgaagatgttagggatccctactggtttcgactccacgaaagggaagcatgtcgaaggcgctgacgtcagcgggattagggctgttaccaagcgccagccgaggcagtacatgaaccgtcgcggtggctttaaccgtcctttgcctgctgagcgtaaccgctaaaggtccttgtcaatgctgtcttaaacacgaggtcagatgatgagagttcgagcttgtatttactgcaattcttccccagacgctgttctaatgtccttagagaacaaacatgtactctctggagttagaaacatcttatctctttttaggg

SEQ ID NO: 14751 - DNA, 575 bp, Glycine max
  misc_feature (38)..(38): n is a, c, g, or t
  misc_feature (53)..(53): n is a, c, g, or t
  misc_feature (100)..(100): n is a, c, g, or t
  misc_feature (124)..(124): n is a, c, g, or t
  misc_feature (142)..(142): n is a, c, g, or t
  misc_feature (189)..(189): n is a, c, g, or t
  misc_feature (210)..(210): n is a, c, g, or t
  misc_feature (262)..(262): n is a, c, g, or t
  misc_feature (304)..(304): n is a, c, g, or t
  misc_feature (337)..(337): n is a, c, g, or t
  misc_feature (373)..(373): n is a, c, g, or t
  misc_feature (407)..(407): n is a, c, g, or t
  misc_feature (411)..(411): n is a, c, g, or t
  misc_feature (442)..(442): n is a, c, g, or t
  misc_feature (469)..(469): n is a, c, g, or t
  misc_feature (471)..(471): n is a, c, g, or t
  misc_feature (520)..(520): n is a, c, g, or t
  misc_feature (543)..(543): n is a, c, g, or t
  misc_feature (549)..(549): n is a, c, g, or t
  Coding DNA Sequence Number=SeqID_4972
tacgctgcaaataaggtgtgtgggcgcgcacgcacacntcatcgtaggaatgnactagatctctatcgtagaacgatcgagatacctgatcgaagagcanacactacgtatcatcatctcatanaataatcgaattgtatangataagatgaaagtatataactcatctatcgtacttatattgaccgncatgcacctcatcacgcactnatgacgccacgtgcatagagtgcgatgttcgctgcgtagtataatatcgagngaatgtaaggactcgctacctatcgcggcacgttgtgtgtgnatgtgttagtatgcgctcacagtgtcgtaatanagcacgtgtggcaattgcacgtgtagtgcgaccacngaggctgtacgatcatacgagagatgtcgcgcgnagangagcggatgtcgagtgctgatcgctccactngcgtagagccgcgcggatatatgattntntacacacacacagccatacgccatacgtgtcatctgcgaggaatggtgncacgatctcacgaacactgtaancacatncgattagttcacacgctaaacaactg

SEQ ID NO: 14752 - DNA, 575 bp, Glycine max
  misc_feature (46)..(46): n is a, c, g, or t
  misc_feature (67)..(67): n is a, c, g, or t
  misc_feature (72)..(72): n is a, c, g, or t
  misc_feature (74)..(75): n is a, c, g, or t
  misc_feature (173)..(173): n is a, c, g, or t
  misc_feature (411)..(411): n is a, c, g, or t
  misc_feature (465)..(465): n is a, c, g, or t
  misc_feature (475)..(475): n is a, c, g, or t
  Coding DNA Sequence Number=SeqID_4973
gaggatctcttaggcagttgtgtatcttactgactatgcacacatnttcgtctcactccgtgcggtntcgcngnngatgctcctgtctatctcatactgtctcaatctctcatccactacacagtactgcactcgtgtctctcgttcgtcgatccgatgacgatagctctaanttaattaacgttgaagtagtatatgagtgtctaccgcacgcagcacatacgatcaccgcgacgacgcgacgacactcacagcatacatcgctcactcagtgacttcgcgtacatatgtacgcgattgcgacgcttgttatatatatagtatgacatcatatgtcgtctatctcagcgtgtgataggacgcatggactcattagacgtcattgagttatgtgtgatcagtaccgcaagngtagacagagtacgagcacgaggagagcgtgtcagggaggcgttgaagtgatgngaagagtcgngagcgccgtggacgtgagaacgagacgatgcacctatacatcataattcctacgagagtacgcgtcacacggtaacctcgccagcaacatacactagaaa

SEQ ID NO: 14753 - DNA, 578 bp, Glycine max
  misc_feature (51)..(51): n is a, c, g, or t
  misc_feature (209)..(209): n is a, c, g, or t
  Coding DNA Sequence Number=SeqID_4974
gtatgcatcagttctcgaggtcattattttattggctgctgccttcaccgngtgcgccaaagtcttcacactcactggcctatgatactactgtcccacatgcccccgcgcacaatgcgacacacagacacaccaaactgcactgatctatgtatgctaagcacatcgtcgtactcaggtattactagttgatacacatctactacganaatactataattcgctgtcagtgcgcatgttcacaatcgccgtatatatttccattctatactctcatttatgtcgctatatcgctcactcctatctatattaaatctaactatatatctcaccgatgctctcacgtcgatcaccacgcagcacacacacacatctctactccattataacctcataaatacatcactcacgagaacataaaacacgtgccagagtgtctactaaccgatatatatcgcatcagacagcagagactcgccgctcgaacgagacctgcacctcgctattcggagtacctattgtgagatgaatacataataactatgccgcactacggtaagaagagacgcccatttgca

SEQ ID NO: 14754 - DNA, 520 bp, Glycine max
  Coding DNA Sequence Number=SeqID_4975
atttgtcaacgcctaaagcctccgataatggcgtggatgcaaatgatacagagcgcgagatctcttctaaggacaactcaaccttcttcgactccatgcctctccagattctactccaaacctgctccttatgccgtgaaagttgggattcctgagttcttgagtgggattgggggaggagttgagactcatatcgctaaacttgaagcagagattggtgatctttcgaaactgcttgtgactcgtacactcaggctcaagaagcatggcgtcccttgcaaacataggaagctgatactgaaatatagccagaagtacaggctagggctatggaaacctagagctgacgctataaaggcctgattggttcctttcttctgtcgaattgcgagtgtgtcatgcgttgttttgctacttagttgtttttcagagtggtctaggcatagcaatgttgccagttacttgaaactcagtcattgttttttctgcattcatgtagtttagttatctccatgggtct

SEQ ID NO: 14755 - DNA, 568 bp, Glycine max
  misc_feature (41)..(41): n is a, c, g, or t
  misc_feature (105)..(105): n is a, c, g, or t
  misc_feature (126)..(126): n is a, c, g, or t
  misc_feature (135)..(135): n is a, c, g, or t
  misc_feature (231)..(231): n is a, c, g, or t
  misc_feature (376)..(376): n is a, c, g, or t
  misc_feature (438)..(438): n is a, c, g, or t
  misc_feature (480)..(480): n is a, c, g, or t
  misc_feature (534)..(534): n is a, c, g, or t
  Coding DNA Sequence Number=SeqID_4976
tacaactatctagagcgagccgactgagctgggtgtgacgncgagtcgcatgcttgtgaagcatgaatgtggagcagtcgactacgcgataactctctcagctangtacgctcatttcctaattanctatattgnttgctcatgctctagtccacgcgtgtgacgtgagagtgagaatcagtgatcacgtcaagagtggtagtgtcgttaatatttgaattcgcagcgtgncgtatggtcgaacgctgctcactctacttgcagagctcatagcgatacagtactgacctatactatctatgcactaagagataagcgagatactaaactagtgccatgtgctacaccatatactgtcaatctatatgtcgtgganacagtcactgacgaccgacgcacatatatgggtgctgtgccgcgtccgcgatcgtcagattngatacatgcgtcaagcacagacgtgtatcatgcgatgtgtanatgtgctctcaccgtataccgctatctatatctaacggacatatctcgcatgcnctgattgtagagctctcgacagattgacaaccgc

SEQ ID NO: 14756 - DNA, 361 bp, Glycine max
  misc_feature (74)..(74): n is a, c, g, or t
  misc_feature (167)..(167): n is a, c, g, or t
  misc_feature (176)..(176): n is a, c, g, or t
  misc_feature (258)..(258): n is a, c, g, or t
  misc_feature (287)..(287): n is a, c, g, or t
  misc_feature (293)..(293): n is a, c, g, or t
  misc_feature (306)..(306): n is a, c, g, or t
  misc_feature (329)..(329): n is a, c, g, or t
  Coding DNA Sequence Number=SeqID_4977
aatcaaatggatgcactggtgttacaagattttcaaaacatggtgttggatcagtttgaaaagttggtcattgngggcactggtacatttggacgagtatatcttgtcagacacaaacccacaaacaaatattacgccatgaagcacttaaaaaaacagaggttgtncgactgaancaagtagagcatatcaattcagaaaaatcaatctttgcagtattagaccccatcatagtaattattcgtcatccaggatganaaatttggttatgatatggagacgttatngggggngtgtctccctgcncggcaggcaatcacatgaagccnccctttttgcggaaacggctgcctaaatttgc

SEQ ID NO: 14757 - DNA, 533 bp, Glycine max
  misc_feature (31)..(31): n is a, c, g, or t
  misc_feature (41)..(41): n is a, c, g, or t
  misc_feature (99)..(99): n is a, c, g, or t
  misc_feature (115)..(115): n is a, c, g, or t
  misc_feature (138)..(138): n is a, c, g, or t
  misc_feature (154)..(154): n is a, c, g, or t
  misc_feature (164)..(164): n is a, c, g, or t
  misc_feature (175)..(175): n is a, c, g, or t
  misc_feature (218)..(218): n is a, c, g, or t
  misc_feature (225)..(225): n is a, c, g, or t
  misc_feature (240)..(240): n is a, c, g, or t
  misc_feature (250)..(250): n is a, c, g, or t
  misc_feature (297)..(297): n is a, c, g, or t
  misc_feature (299)..(301): n is a, c, g, or t
  misc_feature (322)..(322): n is a, c, g, or t
  misc_feature (346)..(346): n is a, c, g, or t
  misc_feature (358)..(358): n is a, c, g, or t
  misc_feature (373)..(373): n is a, c, g, or t
  misc_feature (376)..(376): n is a, c, g, or t
  misc_feature (379)..(379): n is a, c, g, or t
  misc_feature (429)..(429): n is a, c, g, or t
  misc_feature (441)..(441): n is a, c, g, or t
  misc_feature (472)..(472): n is a, c, g, or t
  misc_feature (492)..(492): n is a, c, g, or t
  misc_feature (503)..(503): n is a, c, g, or t
  misc_feature (505)..(505): n is a, c, g, or t
  Coding DNA Sequence Number=SeqID_4978
aaaccaggtcagcaaaccacgtcagcgcccntgtgtagatngacgatggtcgcgacgcgagtccgatctctcatccgcactgagtgtacgtagtgcgtnctgccgactacacgcntctcgactcacatacgcgctacntgcactagcactgtgnacgactcgcntcctgatcgcngacgacgagcgatacgatcgtcacacagaactcagattaggancatgcancacacgatatcaganacagttagtntacttatgcgatacgaagcgccgtatctatcgtatactgttccgccncnnnctgtatgtgctgaattctaantgatctcatatgcagacatcatgnagtacgaccganctatcattgtagtcncanatnttaacagtaatcgatctcgtactactgtgctccctgctgccacgcaccantgcactgcagtnacacacttatacgtgatacactatcatcgcncatatctatagtatagcgangtcctacatananctactactccccatctacagtactatat

SEQ ID NO: 14758 - DNA, 496 bp, Glycine max
  Coding DNA Sequence Number=SeqID_4979
taatatctcttaactataactgcgttaacctctgtcagtctggaacatatatactgtgactggctaggcatggttgagcttcggggtaatcataagggctgtgcaattgccaacactgttgattctgaggggggttcctcattgtggggaattttcacaaagctgaggccagagattagacatcacaaatgggaggtaaagtttttgatttttatgacccctgattgctgggaggaaggctgagggttgcaatgaatgagaggggctgcgggacccaccatgcagagcgcaggagggtgagtgccattgaagttcaaggtaacaatagttaagagacagaaaaccttaacatgcgctggggcgggataagacagattggaactgcttggtttgatggaacaaaaggggaaacagaaggagccatattgcctggagacacatttatttatcagattgaggtaaacaggcctggaacatatctataccacacacacta

SEQ ID NO: 14759 - DNA, 545 bp, Glycine max
  misc_feature (108)..(108): n is a, c, g, or t
  Coding DNA Sequence Number=SeqID_4980
tgagagtgaagctactcgtgcccctcccacgacgacgagcggaaagacacgagatctaccacggacaggcacatggactgctatcttcatactctactagtatctcanaccactcgttgtacacgggtatataactactctctactatccagtggtatgtccgacgattcagtcttattttggatatcaaccacaccccttccaatcatcactacatatataacgtgagaataatgagatataggtgtgttcttgattgtgagtctgcaccatcaccgccctcgttatccttcttctgtgccaatctctcactcatcagtatatgtacgagttgcgtcgagcgcacacgggcaccacgacacatcgactgagtcctatgtgtaaatacacatcagacaagacacagaaacaacaccgaggccacgaactgcactccgtctctaccgttctcctcgctgcgccgctcacacgtagactaacttatatatctgcttgagtcgcgatcctgatcttcgtgtgatgaagaggcgacctcagtcactgct

SEQ ID NO: 14760 - DNA, 587 bp, Glycine max
  misc_feature (114)..(114): n is a, c, g, or t
  misc_feature (162)..(162): n is a, c, g, or t
  misc_feature (195)..(195): n is a, c, g, or t
  misc_feature (247)..(247): n is a, c, g, or t
  misc_feature (306)..(306): n is a, c, g, or t
  misc_feature (522)..(522): n is a, c, g, or t
  Coding DNA Sequence Number=SeqID_4981
acgtcgagacgtgggattgaacactgtagagaaggcgtgtgtggtggcagttacacacacacgcacatactggtgtgagatatcaatgaacgccggatagagatgtaacaacanattggtacgtaacgcgccgaaggccgccgctcgcgctctgagtgttgncacgcgcgttcgtgatcgcacgccaaccaagcngagagcgggcgagttgctgtggtgagggtggcttggtttccgctccccggcntcgcacgcttctcaacataataattatttataagaccacgtgtgttggacgtgaacacncgttactctgtgtgagatgacaacgttgcgcacgccaccagccactgttctagcttggtctgcctggtacatgagccctataccttattagtggagttagtatcgttcaaccgattatagacccgagtgaagttccgtgatagatgcgtttggtgtgctggcgtcagcacgcggatgctagatggggtgcggatatatctcatagacacgagactncgacggaagaacaacagttttatacaatatatatatgaacgataccgacactagttaatggcgca

SEQ ID NO: 14761 - DNA, 220 bp, Glycine max
  Coding DNA Sequence Number=SeqID_4982
gagtgttggtggtcaacacctcaatacgcttcagggttcgcaaggtatcatcaattttggattgccctatcaagaggaagtggagaaaatgcaggggtttgtgacagggcttgctaatctgcaaggagctactcttagggctaaagatattgctcaggctgctctttatcttgctagtgatgagtccaagtatgttagtggtcataatcatgttgtggat

SEQ ID NO: 14762 - DNA, 138 bp, Glycine max
  Coding DNA Sequence Number=SeqID_4983
aagtctcctgcggagtccaggttagctcagctatccgtgtaagagttttgatcccaacaatacttgggtcctccgaaagacccaaacagagaggaggagccgaggaacgacggtcgactcggctgcacgttcgcgggt

SEQ ID NO: 14763 - DNA, 176 bp, Glycine max
  Coding DNA Sequence Number=SeqID_4984
tcctccatcaaaactctccaaagatgacaaccgtagccgcaacaggcatcaacgtcgcgactccacgactggtcattcgaccagcggctcgtctatacgccccggtccgtttgaattacccgtggaaattcggttcgatgaaccggatggttacgtcggtgaaggcgacatcggaa

SEQ ID NO: 14764 - DNA, 568 bp, Glycine max
  Coding DNA Sequence Number=SeqID_4985
aaacagtgtgccattaccttttaatttgttgtgcccttcctgtttgtcgtgcgcacgccggccctagcaacctccttcgtagcctcgtaaccatttgcccttcatctccggcgtcgtgccctcccttcatctctgagttgtagtgctctgaacatactccattctcgactctgtctgtcaaactataccgttttgcaattcatcgaacgatagcgtgttcatttccttttctttcacttagacccatgaattttatcagttggcatcactggcattctgcctacttgttgcttgggtgtgtcttctacttgtgcgtaaaatctttgaattctaggacttgaacaactttgacagtgagcttgaagagtttgccagaatattctacaaggacacagtttgacattggcttctcatggacgagaaaatatcaagttgaggaattccatcattcaagggtctggatagcttgtgtaagcaagtggtgaatgctttgttggtcggtgaaaatcttgaaatgatgatagatcagactaatggacgaccttactgtgtgaggacagcacccacc

SEQ ID NO: 14765 - DNA, 550 bp, Glycine max
  misc_feature (442)..(442): n is a, c, g, or t
  misc_feature (516)..(516): n is a, c, g, or t
  Coding DNA Sequence Number=SeqID_4986
aagtatcgtttatcttctctgcatatacatacactacacatagagtgtattatatctacatttattattactgctttgtcttctctcttttactatttctgtcgttatctctctacatctacgcctatcagccatacctcgccggtgcatagacgagatataactcaagaggtcatacacgatacaaccttaagtacatgttcctccatcattaacatcatgaaactgttcgctcctatccgtccacctacactccatctctttctcctcactttctcttccttcaacttaaaattgatagtaatataatattctacatcgctctcacctagcttcatatatagaatgagtagatgtaccaagatacatcaacctcacccgtgccgggcctggatggtattagtgggggccaaccaaacaaactatatcataaataaatatnatctcctcagccctactcatctctgccccctatgtgtacggtatgtggtcagtcgactttttataatattgtangtggtgaggtatgttggctctgcgtgctggatgc

SEQ ID NO: 14766 - DNA, 305 bp, Glycine max
  Coding DNA Sequence Number=SeqID_4987
gggttaagaaatacagcatgccttcacatgttgctaggtttggcaatccttttctgatgttagatgatgggagaattttcttcaatcggttggattatggactaggtttctttagtgctggagagcatggtgagggatttctgcaaagttatgatccaacaaatgacacttctggtgaggcactaaaactgaaagagtccaaatccattggcgtttacacaggaagcctgctgagtttatagagtagctgtcagtaatgaggtgaataatgcatcgaactggctggtcaccttatgttgtatatg

SEQ ID NO: 14767 - DNA, 581 bp, Glycine max
  misc_feature (63)..(63): n is a, c, g, or t
  misc_feature (86)..(86): n is a, c, g, or t
  misc_feature (172)..(172): n is a, c, g, or t
  misc_feature (367)..(367): n is a, c, g, or t
  misc_feature (446)..(446): n is a, c, g, or t
  misc_feature (531)..(531): n is a, c, g, or t
  misc_feature (534)..(534): n is a, c, g, or t
  Coding DNA Sequence Number=SeqID_4988
accaccccaatatagagtagcaggcggggtgtgtgtagtggtggttggccgcggtcgcgctgnggcggagcactatgatagtggcntcgcatatttgttggtgtggattggtaccggcaaccagtgggtgatagagatagagaagagacagagaagaagtgcggagaagacnaaggggcaaggtggtggttgaggtaggacgcgtgtgtagtgtacgagagatatattggtgtgttgcgtggtagagtggacacgcacgagacagagttgtgatgctctcagcgcgtctagtgtttatattttaagtatttgtgtagcgcacggaggagggagtgtgtgagtacgcgaaggaataggtgggggctcngtcgttggcgcgcacacgcatctccggcggcggggtgtgcgcgaggtgttagtatttagcgcaagcgcggctgtgtganttggtggtcgcgcgagaggtatgtatgaggagagcaagaggcagaggttttataaataacagccgactgtaccgcgggcgccgtngancgtgggggcgcgacgacactcatgttaccgcagagttcgcggtttct

SEQ ID NO: 14768 - DNA, 439 bp, Glycine max
  misc_feature (26)..(26): n is a, c, g, or t
  misc_feature (35)..(37): n is a, c, g, or t
  misc_feature (41)..(41): n is a, c, g, or t
  misc_feature (43)..(43): n is a, c, g, or t
  misc_feature (48)..(49): n is a, c, g, or t
  misc_feature (52)..(54): n is a, c, g, or t
  misc_feature (58)..(58): n is a, c, g, or t
  misc_feature (60)..(60): n is a, c, g, or t
  misc_feature (80)..(80): n is a, c, g, or t
  misc_feature (82)..(82): n is a, c, g, or t
  misc_feature (92)..(92): n is a, c, g, or t
  misc_feature (102)..(103): n is a, c, g, or t
  misc_feature (117)..(118): n is a, c, g, or t
  misc_feature (127)..(127): n is a, c, g, or t
  misc_feature (170)..(171): n is a, c, g, or t
  misc_feature (179)..(186): n is a, c, g, or t
  misc_feature (189)..(190): n is a, c, g, or t
  misc_feature (234)..(234): n is a, c, g, or t
  misc_feature (241)..(242): n is a, c, g, or t
  misc_feature (247)..(247): n is a, c, g, or t
  misc_feature (279)..(279): n is a, c, g, or t
  misc_feature (286)..(287): n is a, c, g, or t
  misc_feature (291)..(291): n is a, c, g, or t
  misc_feature (385)..(385): n is a, c, g, or t
  misc_feature (408)..(409): n is a, c, g, or t
  Coding DNA Sequence Number=SeqID_4989
gcgccatctcccttggactcttaagnacgccgcannncgangngcgcnngannntggncntgggcctgaagcgcgccccncntccgccgagngggccgcgcnnccgtggtcttaagnnacgcacagncaagttagggcggcccacctcactgtcgtcgggggcatggtgnngggtggtnnnnnnnngannaagcctgtctgaggcgcccgtgggctccctggagtgattggtgngtggcgnncccgncaccccgggcccagcggctgtatctaattggncccccgnngcgncgattcagcgcgccgtacacttgccccctccttcatatcgcgccttggcgttcgtgtctgtgcaactagcgtcatagcttacccattgtacacncgcctctcatgtatcatcgcggnngcggtcgcggagtccgtccggaaggcgaga

SEQ ID NO: 14769 - DNA, 527 bp, Glycine max
  Coding DNA Sequence Number=SeqID_4990
catttctcctcgtcttctttcaaaaccgccgctacttccgttcaacaacagtcagatgataaaaagggggagaagggcactaagtactacttccttgttgcaaacgctaagttcatgctcgacgaggaggagcactttcaggagcaactgtttgaacgtcttagatactacggagagcgtgacaaggaacaagacttctggctcgtcattgagcctaggttcctcgacaagttccccaacatcactcagagactccgtcgccctgctgttgctcttgtttccaccaatggcccctggatcacgtttatgaagttgagattggatcgagttctagctgaatcatttgaagcttcatctctggatgaagccttggcctctagtcctacaactctagagttcgaccagcctggaaactgggtggctccgtacccaaagtatgaacctggatggtgggacaccttcttgcccaaagcaaaacaagaatctctagcatagaactttgtccacctttgtcttagtgctttgta

SEQ ID NO: 14770 - DNA, 556 bp, Glycine max
  misc_feature (84)..(84): n is a, c, g, or t
  misc_feature (458)..(458): n is a, c, g, or t
  Coding DNA Sequence Number=SeqID_4991
taatagcgatccactgactctcgatggtctcacgtaaagatcatattcgagttcattaggtatcactcagagcagagctagagnggccatagtgacgatgcacacgggcacgcttcgtcacatcgtagagccatctggtatatattctatacgtcttatctcagttagttaatattcgcgcgtgacagacggatatacacgagaaagatagccaacggtcgtcatcacactataagaggaagtcggtggaagatgtaggcggtgggtgttaccgatcgtgcgtcatcgagatccctcagacatgagtctagacactcacctcgcgatatataacaagacacctcgtgtgacaaaccgagtgagcgttggagctggagcaggaggacagcgagagcagcgaagaatgttataccaaaatacgtagagttcgtgctcctctgttgttatggtagcggtgngtcaacgatcaccacggatgagaacagaagtagaaaacgtttacagattaagaagtcgccatctctatgaaaggaagaaagcgctgaccaccaatcat

SEQ ID NO: 14771 - DNA, 478 bp, Glycine max
  misc_feature (60)..(60): n is a, c, g, or t
  misc_feature (92)..(92): n is a, c, g, or t
  misc_feature (133)..(133): n is a, c, g, or t
  misc_feature (169)..(169): n is a, c, g, or t
  misc_feature (171)..(171): n is a, c, g, or t
  misc_feature (317)..(317): n is a, c, g, or t
  misc_feature (372)..(372): n is a, c, g, or t
  misc_feature (405)..(405): n is a, c, g, or t
  misc_feature (433)..(433): n is a, c, g, or t
  Coding DNA Sequence Number=SeqID_4992
atcatcgtaatacgtcacgacgcgacccgcgccgtcactgcgcggtacgcgccgagatangtatacgcgagctctaacccgacaccacgcgnatctgtagcagtgagataactatcgatgtcgtacggtatcnattgttacatatactgttgtatagctcgacgcgcgntncatgcactgcgtcgatatatgttcgcgttataccggataatagcgtatttacagtgacgatcgcgtcagcagcatgatgtcgtgagagcgaactggctaatatatgatatgtatcgaatcgcgctacgcagtcggcgcgtctacanttcatactagtattggcgatgattgtatgcgcggtatcgttgatcatcagagcgngtagcgggagctacgatgtacgaataaaattanacgtactcatccgcgtcatatcttgtgncactccgcttgacgcatatagtacacgagcgactactatatatta

SEQ ID NO: 14772 - DNA, 587 bp, Glycine max
  misc_feature (170)..(170): n is a, c, g, or t
  misc_feature (225)..(225): n is a, c, g, or t
  misc_feature (360)..(360): n is a, c, g, or t
  Coding DNA Sequence Number=SeqID_4993
gcggcgcgtctgaacacacgagaatcatataggaccgcgtgaaaatatacgagtaacggtcgtgaggtgtgtcgcgttctttatcacagtatcgtgatatggggacagattaacactagtcatgtttatctcaggacacggccctcgtcacagcgtgttccgagcctatncgcacaaccacaatccatataacgtatgcgtcgcatatacacaatttcacatcgngacagtcttacatatagcgcagattatatggccgtcttgtctatggtacgcagacaactgatggagcgaagtacgaggtcagcgagaatgcgagcgctgatattcgactatccgctcatctcgtcactcagccantaatatcatacgcggcggcacgcgtgtgtacggcgtccgcggccgcgcattactatacgataaccctctcgcgtcgcgcgcgcagacgcgagacgcactcacctatgagcggacagctacagcgcacatacacatgtaatatatgtactcggtatgaatatgcggagcgcttggtcggtaattgggcgcatacgcgtcgcgcgcaaattcgttatactcctgggtta

SEQ ID NO: 14773 - DNA, 102 bp, Glycine max
  Coding DNA Sequence Number=SeqID_4994
tggccgtaacagaaacaatcctaataaggctggctttctcacatgtgagctagtaattcttcatgatgcacatgctataactccattgcactttatactact

SEQ ID NO: 14774 - DNA, 567 bp, Glycine max
  Coding DNA Sequence Number=SeqID_4995
aggagaaccaccctgcatgcaggaccacgggcatgagaaggggcaatccaggcgacaggcaacccagtggagcaggcatggatgggacctgggaaagattcgagagggcgagtgcgcgccgtggtcaccccgagcattctgagcaaccccttgagggagattccgaagaggcagatagcgagcagacgaggagtaagattgatgctgggagcgggggagcccctggagctcgggcgcggactgagggggggaaggtggcaccggagatggcttccgacagccagcgcatccgagcacgagatgagggtgttgcccatggaggcgagcctggggtggccccagagccgcccacgtctcctggacatgcaggcgagggggcacacaagcagcctagggcgacccagaaagtcagttcgcccaggaagcgccctgaggaccaggagcaagagaccgtggtcaaggttcttccgcagaccccggagggggtggcagacgatcggtggaacaacctggcgcccaggagcaacctgaagcgggacgagcatacgagggtgatcgaggcgcaca

SEQ ID NO: 14775 - DNA, 407 bp, Glycine max
  Coding DNA Sequence Number=SeqID_4996
taataaagtgctctaacctctctcttaccaaactaggtcaagccgccgtcaagcttcgtttccggcggtcgctgtgccggctaaggcgaccgccgggcctccccttttcatttgcgtttctctgctcctccctctccgtcggtcctcgacgttctgcggcttctaaggcgtgtccaagcttctcatccggagtagatctggagcgttctcttcaccggagccaggccgtgggtctttgcagcgctcgaggacggcgttcgcgtctcaccggctctgtttcttcgactggaggaaggctctttccagatgaggttttcccagtttggacgtggcttgggttgagttatggtgtgtggcggtttggagaagcccgagttgttcgtcttgtgctctaccggttggtttca

SEQ ID NO: 14776 - DNA, 436 bp, Glycine max
  Coding DNA Sequence Number=SeqID_4997
tcccttagcatatttttccccgtctcccccctctcctccctctatcatcttttttctttctctttccttctccccctgcaagtagaagagagctaagcatgacgacggttggcagcagttgctcttcaagcccctcctgtgagcctcctcgtcgctcctctcctctgagccttcgagccgctcctaagccttacaaaaacccttccttcaaaacctccctctctgcgcctttgctttccacaaatgttgtgttgggagagagtaaaaaatcttttttttgaaacattgcaaatcttgggagttcttgtagaagaattggatcttcccatgaagatctaacaacctgcttcaatcatgaatcttagcaagatcaaatcttgaggttaagatttccttacaagaatccttattgaagatgctcttagtatctaatata

SEQ ID NO: 14777 - DNA, 497 bp, Glycine max
  misc_feature (35)..(35): n is a, c, g, or t
  misc_feature (99)..(99): n is a, c, g, or t
  misc_feature (202)..(202): n is a, c, g, or t
  misc_feature (254)..(254): n is a, c, g, or t
  misc_feature (284)..(284): n is a, c, g, or t
  misc_feature (291)..(291): n is a, c, g, or t
  misc_feature (296)..(296): n is a, c, g, or t
  misc_feature (318)..(318): n is a, c, g, or t
  Coding DNA Sequence Number=SeqID_4998
taaatacactgacgtcttgcgcggcaccaatacancccgcacatctcgctctctttaagtactacccccattctctcatgctgtcttatggtgcaatcntcacgcgtcacgatgatatatacgctctgcgtgagtataattactattgacatataccgtggtagtatgtgcgcactattcaccatctgtccttatgatcaanagagacaccacctgccctcgatatgttatataaggtattgtctgtggtgcgncgtcatgatacaacacaagccgcgataganaattaanacacnagaccacgacgatcatatcacnacgttggatatcatatattatgctatgtcgtcataacaacacatactctccggcttactagattttcatactcacacatgcgtgatatggttcatacatagacaccaccacataccacaatcgcggtatgagatgtgaaactcttactatacactctactctctatccacatgtgtgcg

SEQ ID NO: 14778 - DNA, 160 bp, Glycine max
  Coding DNA Sequence Number=SeqID_4999
atacctcactcgctcgcagataaaaatcgcgttagtgaagaacaactccttcttcatcccactatgccttctctatgtgagtacatcccgccccccataactaacctcctactccacctttgttaacaccataccgtagtgacatctcctgctcaccctt

SEQ ID NO: 14779 - DNA, 574 bp, Glycine max
  misc_feature (273)..(274): n is a, c, g, or t
  misc_feature (289)..(289): n is a, c, g, or t
  misc_feature (320)..(320): n is a, c, g, or t
  misc_feature (322)..(322): n is a, c, g, or t
  misc_feature (347)..(347): n is a, c, g, or t
  misc_feature (427)..(428): n is a, c, g, or t
  misc_feature (430)..(430): n is a, c, g, or t
  misc_feature (450)..(450): n is a, c, g, or t
  misc_feature (454)..(455): n is a, c, g, or t
  misc_feature (459)..(459): n is a, c, g, or t
  misc_feature (462)..(464): n is a, c, g, or t
  misc_feature (516)..(516): n is a, c, g, or t
  misc_feature (532)..(532): n is a, c, g, or t
  Coding DNA Sequence Number=SeqID_5000
gaggtatgctagtcaatgttcacacatggtactattaatatcatcccgacatgttctcgtctatttctctcaatttcccagtgattatacgtaagtcataaatcagtaatatgctcttgcatatgatagatgatattgtatcatatatcgtgtagtgagacataaagtcgaatcgcgaagggtgttgagatcgagcagcagatggcttatgcgcggtgagcattcattacatcatataacatcagatattgttgagtggttgtgtacatagannctgatttataccatntagataatgactgctcgcgacgtcgtgacgncncgcatcatgtcatgatctctgactnttccgtctctttgtaccacgtcgccgtgcgtgtgctcggtatgttctttactcgtgagtgatatcggtgctgagacgagnntnggatagagtatagtaagagngaannaganaannnaaggggggggggcccccccccccacctatcatctcctacgcacacaactctncactcctctcacccanacacgatctctgtctgtgtagtagtttatggtttactctctt

SEQ ID NO: 14780 - DNA, 458 bp, Glycine max
  Coding DNA Sequence Number=SeqID_5001
gaacgtggttataggcgtccactcaatctgttttattatcatccggccggctagctgtcctgcagcgcctggagcagcgccgagcggaggtcgtcggcgtcctgcatcgaggttggcacgtccacgaggacgtcttgcagggtcacgccctgcacgtggctaacgcaggcatgctgcacctgcagctccagtgaccggagggcgcccatcagctgcgcgggagcgtgggtggcagtggtggtcacacgcacggcggccccgtctcgtcccaccatccgcacgtccaccgtttcatctacctgcaggaacttggaagctgtaccaccgcgagaagcggcggccgcagctcccttctccaatgtcttgttggcctcgtcctcgaggtgcgctacgcgggtgcgtagctctccgatgtaggtggcagcgtcagcaaggagtgatgccttgtccatacggga

SEQ ID NO: 14781 - DNA, 374 bp, Glycine max
  Coding DNA Sequence Number=SeqID_5002
aatcctgatgaaggccacaagttcaaagaaatagtccaagcttatgaggtcttgtctgacccagaaaaacgaaagacctatgatagatttggagagcaggcaatcaaggaaggagcttcaaatggaggtggtggatttggcgggggtgttgacatgttcgacatgttcttccgtggtggtggtggcagcttctttggaggtggtggaagaagtgaaagagccagacatgcgaatgatgtagttcatcagcttaaagtatcattggaagagctgtacaaaggaaccacccgcaaactccagttacaaaaaaatgttgtctgtaataagtgtgaaggcaagggaggcaagaaagtggaaaccttgcccagtatgca

SEQ ID NO: 14782 - DNA, 569 bp, Glycine max
  Coding DNA Sequence Number=SeqID_5003
ggacaacagtggatgattgacctctggatagctggtctagaagggcatgctctctcaagacctccaattttagaaggagaagcaactgcacgggcaatccgtttagcgaagttcatcaatatgctactgtatgttcatgtgatgagcatagacgcaatggatgagattgccaaggctaaaagagaagtcagatgccgagatctggaaattgcgactacagttgcacgtagcaatggtctacattgcaccacgcttgatggtagtcttggatttttacatttgagctgtcgttgttatttcaattctaaaattgtcaattgaatctgtagttagctggttcttgtatcaggtgatcaggtagggaaaaagggtgctatgacagcaggtttctatgattctagatgctcaaaactaaagtttgtgaagataataagggataacaagacaacaattaataaaaagatgggcatctggagattgtcgaaacaggctaaaagatatcctgctttggtttaattgtagtatactcttccattcacatgaagctgattcaagattgttacatcctg

SEQ ID NO: 14783 - DNA, 474 bp, Glycine max
  Coding DNA Sequence Number=SeqID_5004
gataagtttgcgttcacaacagataaggaagcaaatagagaagtagaagtaaattcgagatataagatgcccaagacattagagttaggaggttcagcacaacagcgatcttccctaactatgcaaccaaatgcttacgtcgttgaaaaagctcctttatatcatcacaaatccagaaatgacaaggaaaatgtggtagtagaaaaaaataaggaaaatgactataaaggaagtacaagtcgaggtggtatcttagatattgccaacagctttttgaactcgcctttgatgcagcatatctcgaatattgatacatctctcaaggaatcaatctctgccgttagtaatgccaccaggactcctgctgaattaagagttcaaatgggttcggtcggtctattaatggtgtctcagatatcgaagatgatgtgagacttcaaagcagcaatggtttccagcagtcaaaatactcga

SEQ ID NO: 14784 - DNA, 416 bp, Glycine max
  misc_feature (341)..(341): n is a, c, g, or t
  Coding DNA Sequence Number=SeqID_5005
ccatctcctagcatttcattctcattcagtatctatcttatcccttttatatcagtacccaacacatcacgtcaccatccggctaaccttccgtcccgccccgttccctcaccccgtgcgctctatttcacataccgttagtttgttgttaggatgcaatacttagttcgtaatactgcataaatttatttctactgctacttcattcttttattctacaataagacatgacattatctcccctgcccaacttctatctctgtgagcctcgaacccagcatccgtctccgagaaatatagagagagtccgacccactctggtttgtcgttgtgtgctgtanggggtgatggggtgagtgtacgggagtgtggacgtggattccagtagcgtcggctgcgctgtgctcgaacgatat

SEQ ID NO: 14785 - DNA, 540 bp, Glycine max
  Coding DNA Sequence Number=SeqID_5006
gtgaggtctataaggaacatccccggagaaatgatggcagttatcttgggacatgtaagcatcataaatcaagcattaagttttgacaaaaggtcccgcagctggtcctatgttgaaaagtactggtcttcttagagtacacttcttttttgatagcccaagtagtctcccaaccttttcaatgacaaaaatagctacagggagctttcagagattgctgaacaagccaagagacgtgccgaagttgcaaggcttagggagcttcatactctaaagggacatgttgagtcagtggtgatgctgaaggggctggacattgacacgattcagcagcaccatacagttgaacgagcctggacacactacaaagagagactgtgccatggaagagagagaagcacagtgggcaactgcaaagaggactcttgatggtcttcacccacctgaaacgaccgatcattgcaatgtcaatgagggttatagggaggggtctgagattgagtatgtaactactagtcgagccagagcttctaggactga

SEQ ID NO: 14786 - DNA, 526 bp, Glycine max
  misc_feature (87)..(87): n is a, c, g, or t
  misc_feature (413)..(413): n is a, c, g, or t
  misc_feature (499)..(499): n is a, c, g, or t
  Coding DNA Sequence Number=SeqID_5007
gtgtggcgcatgtgacaatgtgtatatacacactagcgtgcgagtgacgagatagagaagatatgaaaaagtaaagacaacatgggnctcgtcaatatcttaatcgcaaacacagacgactaacatgtaactgtgtgtccgcgctgtatcggcggcgagaataaacacacagagacgagccagaaaacaatatagtggtcagtgtcattcgatgtcgtcgtggcctcggatatcatatctagatagcgggcggcgggcgagagcacgcaaaccgatctctgatagaaagacataatgtccgagtctcttctccatatgttcgtctagcatctatacacatagtgcagcgagcatctatctcgtgcgagatataaaaaaaaaagagattacgcatgattacagaattatgatanacatacatatacgtgtcacacatacaaagtaccgacatagttctgtcgcgtgagtgtgtgtcgtctctaccgacactcagcacccntcgcgcactctcgcgtgatagatgact

SEQ ID NO: 14787 - DNA, 398 bp, Glycine max
  Coding DNA Sequence Number=SeqID_5008
gattaagacaaaatgccgccgaagttggacccatctcagatcgtcgacgtctacgtccgcgtcaccggaggcgaggtcggagcagcgagttcactcgcccctaagatcggtccactcggtctcgcgcccaagaagatcggagaagacatcgccaaggagacggcgaaagagtggaaaggcctgagagtcaccgtcaagctcaccgtccagaatcgtcaagccaaggtcaccgtcgttccctccgccgcggctctggtcatcaaggccttgaaggagcccgagagagaccgcaagaaggtgaagaacatcaaacacaacgggaacatctcgtttgatgacgtcatcgagatcgctaagatcatgcgaccgaggtctatcgccaaggagttgagcgggac

SEQ ID NO: 14788 - DNA, 585 bp, Glycine max
  Coding DNA Sequence Number=SeqID_5009
gtagtgaagcattttgtcgatgacaaaacgcgcaaaaagattcacattcttggctcaggctataagaaggaactcttccaatatgttgatgaaaaagaccttccagattttctaggtggcaaagctactgttgaagactatggtgagaatttaacaaaagaacaaggtccttgggtgaaaggtgataatgaattggtaaataattcaccagtgcaagaaatgaatagaaagataagtacagaagcaggtgaagatgatagaccttcattggttcttgatattccagagactgaacaaatgagaacaaagagtgttccagtgttgccaaaatcatcgacttcgattgaaagtttgaatgatatggaaggatatgatgtggcgacagaatcaccattgaaggttagagtaaagagtttgcaaaccaagcctagtatgagttttaatacattaagaagttttggagtgatataagatttgattaattgttgatgattgattatgtatttgtaaatttaattattaaatgttgagagattattcctcttttatatgaaagaataatcttcttactttattacttactat

SEQ ID NO: 14789 - DNA, 505 bp, Glycine max
  misc_feature (73)..(73): n is a, c, g, or t
  misc_feature (316)..(316): n is a, c, g, or t
  misc_feature (374)..(374): n is a, c, g, or t
  misc_feature (392)..(392): n is a, c, g, or t
  misc_feature (456)..(456): n is a, c, g, or t
  Coding DNA Sequence Number=SeqID_5010
caagacaggctattctaagaaccaaatatcagaaattatcactaccaccaaacttatatgatagatacattantatgcagatattatatgagactgtacacacaccgacatatagccatatatagatgatgttagctagacgcatcttatctatacgcgccagaagagtatgcacacgcacgacataaaatgttcataacggccgcacgcgccacgagtgatattcacgacgcgcgagtgcccgcacgtagagaagagtggtttacaccgacacaacaagatgtaacaccccgcaccagattaatatagtacacgncagatgtaagacaccaacaaaataccaactacacagacacacccctttcaaaccgctngacacaaacaatacaagngagtagaaagtgtagtcccttgtattgcagcaaacaaacgagcatgagtacaccacacacaacncagccagcacacgcctaccgcccctctcgtgtctttcttgtcttcatag

SEQ ID NO: 14790 - DNA, 580 bp, Glycine max
  misc_feature (217)..(217): n is a, c, g, or t
  misc_feature (309)..(309): n is a, c, g, or t
  misc_feature (361)..(361): n is a, c, g, or t
  misc_feature (485)..(485): n is a, c, g, or t
  Coding DNA Sequence Number=SeqID_5011
gaccaaagccagacggaacacgacgaccggacaccacaccagacagcgacgcagcagagctaacgtcaaccgaaccgccgaaagcgcaaacattgcgacacaccaggcacagcggagatagaagaacacaccacagagcgaacagacgagagagagaaacacacacaaagcgaaagaggacagagggaataagaaagacacgaccagacgaaataancaagaagaccaacgcgaaatcatcggaacgcagacgtgaccagcgcatgatggaaacagtgatgacacgcgcgcacgagacaaagaacgtantaacaagacaacatatcagatagcatacagatatacgtcgagtacacacacnacggaggccgagagccgcgtgcacgtgctacgaggagaggcgacaccaccgatgacaggcaccgccaccacactaaggcaacgagccgtacacacgagaaacacagtgaagaccacgagacagntacgacagagacacagcagtcagaccgccatgacgcatggaacagtcactacgaagacgcgacggaacgagcgcacacaatgctcacacggcgga

SEQ ID NO: 14791 - DNA, 384 bp, Glycine max
  misc_feature (54)..(54): n is a, c, g, or t
  misc_feature (60)..(60): n is a, c, g, or t
  misc_feature (70)..(70): n is a, c, g, or t
  misc_feature (72)..(72): n is a, c, g, or t
  misc_feature (80)..(80): n is a, c, g, or t
  misc_feature (83)..(83): n is a, c, g, or t
  misc_feature (99)..(99): n is a, c, g, or t
  misc_feature (101)..(101): n is a, c, g, or t
  misc_feature (111)..(111): n is a, c, g, or t
  misc_feature (143)..(143): n is a, c, g, or t
  misc_feature (146)..(147): n is a, c, g, or t
  misc_feature (206)..(206): n is a, c, g, or t
  misc_feature (208)..(208): n is a, c, g, or t
  misc_feature (225)..(225): n is a, c, g, or t
  misc_feature (227)..(227): n is a, c, g, or t
  misc_feature (232)..(232): n is a, c, g, or t
  misc_feature (236)..(236): n is a, c, g, or t
  misc_feature (248)..(248): n is a, c, g, or t
  misc_feature (280)..(280): n is a, c, g, or t
  misc_feature (313)..(313): n is a, c, g, or t
  misc_feature (318)..(319): n is a, c, g, or t
  misc_feature (329)..(329): n is a, c, g, or t
  misc_feature (333)..(334): n is a, c, g, or t
  Coding DNA Sequence Number=SeqID_5012
ttgaggatggattgtgaggagatagagaaggggaaatggaagcggaaaccttcntttgangtgccattgncnccaccgtntcncatggcgtctgtttgnanactgcacttncgctctctttctcttcgcccatgcctctacantannagcaattgcagtagcgctgccactagaaatcgcattagcatcagaagtctgaatctccnantggtgctcttgcgcccnangactnaaangcgattccatcnattccattaccaaatttcaccatcaacttgcntcattccgggtaccattcctccattcctgttgnatcannatggtggaancaannttccgatttgtggatgtgttgcggctgtggatttggttgtggctggccga

SEQ ID NO: 14792 - DNA, 447 bp, Glycine max
  Coding DNA Sequence Number=SeqID_5013
caaaataattgatctcctagtcggggtttctcttataaaatatttatttatttaatttatttggaaaattaaaataacaaataattaataataatatggggatgtctaaaagtatcaaagttattttctctcttgctcttatagtgttcttggctcttgcagcaaccaagatagatgcaagatacatagattatcattcccttagaggtggagatcacggtttcggttgtagtaaattacaccctatcttctgcaagaaggaagaagccaatccttacaccagaggttgcgagcctggccaacattgccgtgacgatctaggcgaaaaaatcgtaaaccctaaaccctaaactactcttggttaatttttacaaatcacatccccatattaatatcagatgattaatttcattttgttatttatttatactctgttattggttaggt

SEQ ID NO: 14793 - DNA, 465 bp, Glycine max
  Coding DNA Sequence Number=SeqID_5014
cccagcagctggacggatgagtataaaagaattttgaagttgtttgatgagagattgaagaagtaacccaaatagctccaatacccgcgtcccaacataatttgttgaatgcgggtatttctttatttaatatatcatctgctgttgatttaagtgttgaccaagtagcattcatttcttttactctgttctttgccgcagtggttactattggtaaatcctgcagcatttgattaattaaaaacagatagttggcagtgaatttattcggaaaattttctgcatcatcataggctttcgatttacgctgaaccatatcttcatcccatgctttcattttctttagcaattgctcgccggcggctttaaccgatttgtatttttcatctgaaggaatattttttaatactgcttctagttgttcttgcttactataaagcatagttaccatatcgtgcatcgtag

SEQ ID NO: 14794 - DNA, 548 bp, Glycine max
  misc_feature (174)..(174): n is a, c, g, or t
  misc_feature (178)..(178): n is a, c, g, or t
  misc_feature (281)..(281): n is a, c, g, or t
  misc_feature (289)..(289): n is a, c, g, or t
  misc_feature (296)..(296): n is a, c, g, or t
  misc_feature (463)..(463): n is a, c, g, or t
  Coding DNA Sequence Number=SeqID_5015
actgccgtctactacggtcatcattcgacatcacgacactcaccatatacagcagcagacacgcgctctctcacacacatgtcgctgcacacgtcgccacccactatatctacaatatgtaagagtcagtactgtctcgactcatcgtgctcgcgtctcgatgcactcgtacanagcncatctatctgatgaacgcacgtctacctaatacacatgaatcacatcgacaacatggcacctgtctcatggacgtgtgatagagacggagctaattaggagcngactaaantaaatcncgacgataagttctgctgtgaatagataagacacactaagcgatgcgctgcgggtcgcctcctgcgcatgctgatggtgctgtctgcgcgtgcgcgcaacgatgctcatcccgcgacctctactcttgtgttctattaccaccaacatactccacgaatacgtctcngctaccgtctacgtcctgtgcaacacgtcactctatccacgatgaccattctaaactatgttatgcatccatacacacgtcgacg

SEQ ID NO: 14795 - DNA, 596 bp, Glycine max
  misc_feature (97)..(97): n is a, c, g, or t
  misc_feature (241)..(241): n is a, c, g, or t
  misc_feature (282)..(282): n is a, c, g, or t
  misc_feature (289)..(289): n is a, c, g, or t
  misc_feature (320)..(320): n is a, c, g, or t
  misc_feature (322)..(322): n is a, c, g, or t
  misc_feature (379)..(379): n is a, c, g, or t
  misc_feature (420)..(420): n is a, c, g, or t
  misc_feature (433)..(433): n is a, c, g, or t
  misc_feature (450)..(450): n is a, c, g, or t
  misc_feature (474)..(474): n is a, c, g, or t
  misc_feature (489)..(489): n is a, c, g, or t
  misc_feature (497)..(497): n is a, c, g, or t
  misc_feature (499)..(499): n is a, c, g, or t
  misc_feature (518)..(518): n is a, c, g, or t
  Coding DNA Sequence Number=SeqID_5016
gcggcgacatcctgatatatcacacgtaatgcgctgcgatgatctaccatacactatttacgctagttactcgcgatccccactacctacccatacnctctagacagcgtgtgcacgaggtatcgtcgatcgtagtatatagatgtatagatgaacgatgacacacatctactgtcatggcgtctctgttatcaatgcctccgtagcggtgaatgtgctcacctgtccgccactgcgtctntgcgtcacggtgtgcgagtgcgcgcgtgatgatcgctagangtagganaggagtactcctcactggactacacatcgancncgatctcctcgccgtgctcatgcgcatcattatctctatcatatgaatactaccgcntgtctcgtctcgtggagcggtcgcatatatttctataattnacatatctacganctcagctacccgcaggncggcacagcgtcgatgactacatnctcttctgcctgaantctactancncgcgcatcagtagacatcntcagcactatgtctcgcacacacatcgatgtctcgacagatacaatcatgtctgatgatatagatctgcgctcgacga

SEQ ID NO: 14796 - DNA, 351 bp, Glycine max
  Coding DNA Sequence Number=SeqID_5017
aacacacaagtgtctctagaattgccataccccggagaacctcctacaggaaccaagcatggcaccgttcgtttgcacctcccttaagggggccacaaccagattggttaaaaaagggacatttcccccgaccccgacccccgtaacacaaccccccggagcaggtcaacccccacccccccccgtctccaaatggtgctatacctcatatttcagccacccccccgtcccaatcccctttcccccaggccccttaaacctcccatccacacccacatatctccgctccccctcgcccccacaactccttcctcggcccctcccgcgcgggcggacaaaatcccccagcta

SEQ ID NO: 14797 - DNA, 570 bp, Glycine max
  Coding DNA Sequence Number=SeqID_5018
aaggtatctcggttctgtgtagtgatcttcaggtggaaccccaagacattgtcacgctggttctgtcgtggcatatgaatgctgccacagcgtgtgaattttccaaggaagaattttttggtgggttacacgcattaggtgtagattccactggaaagttgcaagaaaagctgtcatttatgcgttctgagcttaaagatgaacaaaagttccatgaaatatacacctttgcttttgggtgggcgaaagagaagggacagaagtctcttgctttagatacagctattggtatatggcagctgctttttgcagaaagagagtgtccgttggtaaaccactggtgtgatttcttacaggatcgtcacaacaaggccatatctaaagacacatgggcacagctcctggagtttgcaaggacggtggacccggcgctgtcgaactacgatgcagaaggagcatggccttacctcatcgatgagttcgttgagtacctgtatgacaagagcgttgttgagaagtaacatgccaattgggagaagtactcagctctatttttacagtggtccttgc

SEQ ID NO: 14798 - DNA, 369 bp, Glycine max
  misc_feature (228)..(228): n is a, c, g, or t
  Coding DNA Sequence Number=SeqID_5019
aacccaatgagatgtcacttgccaaaggagcgggggttttgttgattctgggtaagattttttgttcagataaggaagccgcatggcatttcccctaagacacaaagtgtttagttccaggcacctggatttccagaaaagtttaggacaacatgcagaatcctgcattttatttcgatgagctgcgacataggggattttagcaagccgctggaagttgttttcatnagttcccccactggcaaacaaatatagtcagggggcaaggcccagccaacaaagggttaaagaaaaataataaattaaaaagccctatctcgaacttcctttagggatgttgaagttgctgtgggtctttcagagggaatt

SEQ ID NO: 14799 - DNA, 526 bp, Glycine max
  misc_feature (193)..(193): n is a, c, g, or t
  misc_feature (351)..(351): n is a, c, g, or t
  Coding DNA Sequence Number=SeqID_5020
agaggcggacaaccattctactcaactgtgtacctgtgcggtggttaccgcacctcacacacccactcccacacagtgaggtggcagacgacgcagagtgcgcgatgtgacgctgatcagatacggtagaggttgaggtccgtgagtgtatatactggacgtatgcagtatgacgtatgctttgccgtctctncatctctgcgcctcacttggctgcatctctctattgctgtgtactagtgttatctatcatgatcgagagcgacgcacactcgagacgcatgtacgaagaaaatctggaggactacgacgtgcgggcgggagtgaggggtgtcgcgggcgcgcgggcgngactcgtcagcgctccgccgcgcggtaatacgctgcgtatattttcatctttaatcgtcgactcagtgaagtacactaacagataataaatgtgtgttgactacaatacttagtacgcctccgtgtcgcctagctcggaccgctgaatatgagacatatatccatgctgatcata

SEQ ID NO: 14800 - DNA, 311 bp, Glycine max
  Coding DNA Sequence Number=SeqID_5021
caaggttagctagtctcaatttttttcatttggtttgttgcttataaaaatcttaaaatcaaaagttttataaaaactgtcctcgactcaattttagctgcaacctcaaggtttttgaagtctaataggtctttgtgtataattctcccatcaaaattgaagtttcaccttggtgatctgcatagacatttagtgagagcctttggcagagttatgacataaaaactgcatgtctatgagagaatagatcaaagcagcgaatgaattgcacataaggtttggttcttgaagtattcgcaaccacacaagag

SEQ ID NO: 14801 - DNA, 566 bp, Glycine max
  Coding DNA Sequence Number=SeqID_5022
ggttatgacaaccaagcgttccaacaatgttgcacagatcctctctgggaactgcttgaccgggataagcattgcttggtggaagtggactcacgatgctcaccacattgcgtgcaacatccttgaccatgaccctgatctgcaacacatgccggtctttgcagtttcgtcgcggttcttcaattccataacctctcatttctatgggaggaagttggagtttgatttcattgctaggttcttgatctgctaccaacactttactttttaccctgtaatgtgagttgccagggtcaacttgtatctgcagacaattctgctattgtttctcaggcgaaaagtgcaagatagaaccttgaacataatggggatccttgagttttggacttggttctctctttgagtgtcttgcctgtcaaattggtctgagagggttatgtctgagcttgctagcttagctgatggctccatccatcacattcattcttgatggaattgctatgatgcagatgtatttgtcgggcctcctgaatgaaatgtactgtttgagacgtacatcagtggta

SEQ ID NO: 14802 - DNA, 436 bp, Glycine max
  misc_feature (78)..(78): n is a, c, g, or t
  misc_feature (90)..(90): n is a, c, g, or t
  misc_feature (180)..(180): n is a, c, g, or t
  misc_feature (275)..(275): n is a, c, g, or t
  misc_feature (325)..(325): n is a, c, g, or t
  misc_feature (331)..(331): n is a, c, g, or t
  Coding DNA Sequence Number=SeqID_5023
tcgcaggagacgttgtgtgtgtactgttctgctgtattatatatagatatgctgctgtctgttgtgtgtaatacgcancataccgatgtngcacctgtggacatgtgagaagtgtgcgcttcttgtcgtcgtgttgtatgtcgtctctgtgtctgcgtgtgttgttgtggttgtctattngttattatgaggtggaggtgttgtgtgatgagtgtgagatgtcggatgcgagagcgatcaagatcaagacggtgtgctggataagaacgactgtntcgcatgatatgtatgatattcagtacaccgtagggatatgagtgcatgnattgtncatcgcaatggcagctacagggtgtgtatgagatgcctcgaagccggagacgaatatgatagtggggagggtagcggtagcgcggtagagttacgcgccacgagc

SEQ ID NO: 14803 - DNA, 564 bp, Glycine max
  misc_feature (27)..(27): n is a, c, g, or t
  misc_feature (40)..(40): n is a, c, g, or t
  misc_feature (45)..(45): n is a, c, g, or t
  misc_feature (77)..(77): n is a, c, g, or t
  misc_feature (143)..(143): n is a, c, g, or t
  misc_feature (168)..(168): n is a, c, g, or t
  misc_feature (310)..(310): n is a, c, g, or t
  misc_feature (329)..(329): n is a, c, g, or t
  misc_feature (333)..(333): n is a, c, g, or t
  misc_feature (439)..(439): n is a, c, g, or t
  misc_feature (527)..(527): n is a, c, g, or t
  Coding DNA Sequence Number=SeqID_5024
tcagcagctgctatatcttcgacatgngtgcaggagttgnatgtngtgtatcatgataggtgtcatatctctctagntcgacgtatgcctacttcgtgtacggtgtgtgacgatcactctatcacgtatcgtcttatcgcgtntgcatcttcgtagataatgtcgatngagtacagcgtctactgcagcatgctagccgcactctcggatagtacgagctgcggtgtgcgcctcgtcagtcattctgaccacgatgtaggctattgctcgccaagcagtgacgtctcagtgtcacacatacagccagcantcaactatctgtaataganacantgacacagcacctattccaaactactgcacgctataatcatattacaccaatatatcaataaaatcacatcagcgtatctctagcgcgacagcataaacaacgtancaggctgagcacgatactgaggtgtaatgctagatagactagcgcgagacgcgcgcgctatgatataccagacgtggtgtctccgtgnttggtgtggcgtgtgtgatgcgtcatgcgcgcgctac

SEQ ID NO: 14804 - DNA, 213 bp, Glycine max
  Coding DNA Sequence Number=SeqID_5025
gtttttccgcgctttgggtggagtggtaccgctttgccgccagacgaacggccggaggccaggagttaattaacggaggaacgggagaacgccccatttggaaaacgccttttttccgggggtttggcggtttatttattcaagtggcccggcaggtttttcggcttggaaacggggagtgggggccacgccatttatgtgggtttggttcct

SEQ ID NO: 14805 - DNA, 88 bp, Glycine max
  Coding DNA Sequence Number=SeqID_5026
tgtgtcattggtgtttcccacgacctatagacacttgggagtgagattttcttcagacgtggggaaacatggcccgagccgcccagga

SEQ ID NO: 14806 - DNA, 326 bp, Glycine max
  Coding DNA Sequence Number=SeqID_5027
aaagaacatgtgatgctgttgaaattgaagtgaaccaaattgattgatctcccaaatcctaatttgcagtgatgtgtgtttattcggcactgtgcgtgaggggtttgcttggatggtacgtccgcctaacccacatcttcttgtatgccatgcctccaatgagacagtgcaactgtatcaactctcaagatggttcagagctcaaagcttgcttcaaggatcaagtgacatgttcccccggagttgaactatttttggttcactgcttacatacattggcccttgttgtagttggtttgatggccccatttgtgaacacaatcaca

SEQ ID NO: 14807 - DNA, 158 bp, Glycine max
  Coding DNA Sequence Number=SeqID_5028
aattggatttaaattttcatgctccaagttgagtacctgtaatccaaacacagcaacccaaaatatgcatgcttatggcgctttgattattgttgcattgagtactctcttgatcttcatttataattgttctgatcaagttctagttactcgagaaa

SEQ ID NO: 14808 - DNA, 504 bp, Glycine max
  misc_feature (37)..(37): n is a, c, g, or t
  misc_feature (163)..(163): n is a, c, g, or t
  misc_feature (197)..(197): n is a, c, g, or t
  misc_feature (199)..(199): n is a, c, g, or t
  misc_feature (270)..(270): n is a, c, g, or t
  misc_feature (286)..(286): n is a, c, g, or t
  misc_feature (294)..(294): n is a, c, g, or t
  misc_feature (330)..(330): n is a, c, g, or t
  misc_feature (335)..(335): n is a, c, g, or t
  misc_feature (384)..(384): n is a, c, g, or t
  misc_feature (386)..(386): n is a, c, g, or t
  misc_feature (405)..(405): n is a, c, g, or t
  misc_feature (433)..(433): n is a, c, g, or t
  misc_feature (478)..(478): n is a, c, g, or t
  Coding DNA Sequence Number=SeqID_5029
atacaagccgcgagtgtcgtagcgcgcgtagatcatnatcactcacgcacgcacgcgcgctaaatataatatataggtgacacgcaaacagaacgacacgaaatgtcgcgaagtaaaacagccgcgcacgcagagcgcgccgtgaggcagcagagacacgccnggagtatatcatacatagatgacgaagcggacgncncgtaacagaagaaatgccgacaccgcgagacgatcagccccgtacgctgcgcgataacgtgaatcaccccnacgacgagtagagggngacagaanatgtacacaagcggaacggcacaagcgtcgtatatnatcgnacacaggataaaatacgcaaaacggacgcgcacacacgacccgcaagtnantatccacagatcccgcgancgaggtgataaaagtgagcgacgccacnacactacgcggcgtcgagcagagtgacagcgacgccgaaaaagtngtctggtgtggactgcccatgagcac

SEQ ID NO: 14809 - DNA, 370 bp, Glycine max
  Coding DNA Sequence Number=SeqID_5030
ggctgcggaagtagctcccggccttagcctctgttccagcaccgcccgagagctttacttggagcttcgtctatcatttcccaggtgtctagaagtgacattgacgaaaggcttgagtatgtaaggtttgatttactatgattttcatctatatgcagtaagcggtagtactcactgattctttcagtccgagaaaatgattttttgtggaataaaagatacatgctctgatctatatgttcattcattcatgtggatagttagaactgcacactatcaacacctacctctttcacttgctttccccaattgtgttttttaaacttcttgcaagaagtcattgtatacattggtccttatcttgtttaaa

SEQ ID NO: 14810 - DNA, 537 bp, Glycine max
  misc_feature (34)..(34): n is a, c, g, or t
  misc_feature (46)..(46): n is a, c, g, or t
  misc_feature (110)..(110): n is a, c, g, or t
  misc_feature (228)..(228): n is a, c, g, or t
  misc_feature (243)..(243): n is a, c, g, or t
  misc_feature (322)..(324): n is a, c, g, or t
  misc_feature (356)..(356): n is a, c, g, or t
  misc_feature (402)..(402): n is a, c, g, or t
  misc_feature (442)..(442): n is a, c, g, or t
  Coding DNA Sequence Number=SeqID_5031
ggatgacaccgcgatgcacaactaaaaccacacntatatcatcganatacatcacaacatgtgcgtccgctaatatgcacccacatcgcaacacactactcacaccatcntcacaacaatcaacatcaatatactataaagcacatgtctcatacattcacactaacatatactatctacattatatcaacgacacaacacagtgtacagacataactatacactagnttgacgttctcttgnactccctatcatcctcgcttactccctcgacctctctcattactcgtacgatctgtcgtgcctgtcgagcgaatccgtnnngtatagcgctacgtcaccatatattacactantcgacgtctcactcgctcccaaccagcgctcatgcaacgctcgccntgtccaccgctcgcagtaatctcactcatcgacatctccnacatcactcctcaaatctcatcacgcgcaacacatcgatgctagtcatcaagacgtacaactgatacgattacgtaataacttaatgcaccgtgc

SEQ ID NO: 14811 - DNA, 343 bp, Glycine max
  Coding DNA Sequence Number=SeqID_5032
ttttccagaatccaatcaccctaagcttctggctttttaaccacttttgagttcattgtaacaaatcagatgtttgcattgatcttgcacgaagtctgctttttgacattccaaggtcctgcgtcttgtctcatgcctttacatagtgaggccacgtacacctctaggcaaacagttacacacgctcgtcaatccagaatcaccccagtgactatgcatctccctgaagttattgaaggctgtagtcagggctagtgaattggggtactggagtcatagcatgctccttcccaggctgtgtttgttgttgttgaggagggaattctgttcaccggaagccatt

SEQ ID NO: 14812 - DNA, 535 bp, Glycine max
  misc_feature (127)..(127): n is a, c, g, or t
  misc_feature (211)..(211): n is a, c, g, or t
  misc_feature (284)..(284): n is a, c, g, or t
  misc_feature (358)..(358): n is a, c, g, or t
  misc_feature (433)..(433): n is a, c, g, or t
  misc_feature (477)..(477): n is a, c, g, or t
  Coding DNA Sequence Number=SeqID_5033
tttactatgatttctcttccctctacttaccactatcagatctagacatctgtgtgggtgtgcgagttgtcaatactctgcttgcctaccacacctcgttatgagcgacagccgcttcctgattctnctacttgtgcgaccgttatctccatactctatcagatctcctctttatacgtcttaccgttgagcgctctcctcgccgcgtctnctgttccacatgtcgtcgtgctatggcgtggtatgagagagtgtgagcgcggcgccgccactgtgcatacagntgatagagcgtactaccgcatgagggcgcgtaccacctatgcggtatcatacagtgcgatgcgctctctcgtgngatctgctatccacgctctgataagtgaccgtacatagagatggtgcttgcctgactatcagctctccgtatcanggatcggtcaactttatgctgcgtcaccactcgctcacacatantctctcactcctcacaattgccacgcgcatcgcgactatgtcgcgtgagttatctata

SEQ ID NO: 14813 - DNA, 527 bp, Glycine max
  misc_feature (229)..(229): n is a, c, g, or t
  misc_feature (311)..(311): n is a, c, g, or t
  misc_feature (313)..(313): n is a, c, g, or t
  misc_feature (448)..(448): n is a, c, g, or t
  Coding DNA Sequence Number=SeqID_5034
gcgtaccaagcaccgcggatcgagaatatgctaaaacttataaacactaagacgatgtagatagttctttactctagagtgagttattggtgtgtgataatatataaatctgtgtctgtacgatctttctatctctttattgatatacgtcatttttactctgctattagtgcgcattcgtgacagtcttgcactgatctgctctcctctctctggtgtgtgtgtgttnctggtaggcgagagaagtgcgcgtgtgtgctaccattctccgctggtggatccgtccccgccgggcgcccgtatagatacanangcaatgacgacacgcgtgctcctcctactcgtacggccagatccttagcaagtgaagaggaaccccacttatcctaccattcccgctgcgcccgtcagcgggtggcgacctctaccatgtatacttttagcgtgngagagggagagggcatatataaaaatcacgtaactaagaatatcgaactaccatatagcgacgccatattcgcgtggtg

SEQ ID NO: 14814 - DNA, 428 bp, Glycine max
  misc_feature (207)..(207): n is a, c, g, or t
  misc_feature (219)..(219): n is a, c, g, or t
  misc_feature (259)..(259): n is a, c, g, or t
  misc_feature (294)..(294): n is a, c, g, or t
  misc_feature (328)..(328): n is a, c, g, or t
  misc_feature (356)..(356): n is a, c, g, or t
  misc_feature (378)..(378): n is a, c, g, or t
  misc_feature (380)..(380): n is a, c, g, or t
  misc_feature (393)..(393): n is a, c, g, or t
  misc_feature (397)..(397): n is a, c, g, or t
  Coding DNA Sequence Number=SeqID_5035
gcctcaacaaccctaacgcgtgcagagcagagagagacgcagccatggggcgaagacccgcgaggtgttataggcaaattaagaacaaaccataccccaagtcacggttttgccgtggtgttcctgatcccaagatcaggatttacgatgttggtatgaagaagaagggtgttgatgaatttcctttctgtgtccatcctggttagnttgggaggaaangaaaaacgtttttctagtgagggcccctggaaagcctgcntccgtattggctttgcaaacaagtacatgggcccnattttgcttggaaaaggatgctttccccttgaanaagtcagggtgcacccccattccatggnttcttaagatcaaacaagaatngncttttcgtgtggncggnagctgatagggctccaaactgggaaatggaa

SEQ ID NO: 14815 - DNA, 312 bp, Glycine max
  Coding DNA Sequence Number=SeqID_5036
aatcgggacaggagcacacggaatcgggaatcaacacgcggcgatgtgtgctcgtcatcttcggttccgacatgggtcaacggatcatcgaacaccacactggaaactcggcctgcctaacgagggatcgtgaatcagaatcctggaatcggagaccggagacacagcatgacgaaaccggcaatcggtcaagcacttcaggctaacggcatcggcggctacgatactcggcgaggcgggactagagcaacggtgaaaatgcggatcggcgatacaggagcaccgatgggacgtgtcatcggagaactacta

SEQ ID NO: 14816 - DNA, 590 bp, Glycine max
  Coding DNA Sequence Number=SeqID_5037
gaaccatgcactacgaattaggcgacgtatagtgactcactctcgcgctccacaaactgacgattccattatgtgagctccctttcatactgtccgtttgtcgccccggcggctacataacacgctaataattccactcattctccagtcaaatggtaacattctccgtattattgcttgttgtatattgtatatttagtttaagtagttgcttgctgcatgagaacagccccacagcgtacccacgccaccgaacatataataatacaaaacttaaacatataagatcctctcgtggacgaatcacgtattctatcaaacctgtgcctgggtccgtcgaacctactattatagaagtgtgagaggtagtaattcgagatatagtaatatgtacgcgaagtatctgtaattctgataaacggcgaccgagagtcaatcgattaattgagaagggacaatacacacgtcgggccgtccgcgacgctgcaacagaacacttacaccttctcacattaatactcgctttataatatgtcatcactccttaacatcatccgttaagatatctgtctgaccaatcgcttatatgc

SEQ ID NO: 14817 - DNA, 445 bp, Glycine max
  Coding DNA Sequence Number=SeqID_5038
gaagaagcaaaagccgaacccgcgcgacccaccaccggcgaagtttttttgggaaaggggagctatcccatttacatcggatcggggttactaaaccaacccgactatctccagaggcacgtgcatggaaagagggtcctagttgtaactaaaaaaacggctgcgccactttatctagacaaggctgttgatgctttgacaaggggaaaccccaatgggtgctgtggagagtgctattttacctgagggggagcagtaaaaggacatggatactctcatgaaagccttggaaaaggccattgggttgggactagaccgggggagtaagtttgcggctcctggagggggtgggatggggaaatgggggggggggctgctgcttggggccaagggggggtaatttgatcagaaccgaacacggggagggccagggagagacttcggg

SEQ ID NO: 14818 - DNA, 382 bp, Glycine max
  Coding DNA Sequence Number=SeqID_5039
tgctcgaggtgctggagacactactcgaagggaaaggaccgcctacatcatgatgtgcggttgaaccgatctctaggactgaatgccgagttcatcatagataagatgcaactgtggatgccatcgtggcaggaaaacctacattatgggaaatccgtcaatgggatgatactgacaccgagttggcaatgtatgctgcattggcggatgaacagctgggagaaactactgacttaactaacactcatatcacgagttctgaccctgaacctagtgaggatggaagagatcacccacgtacttggtccacgaaatggagtaccagtggacctgggatgactaggagcacaccagtgcaagtgctatacttacgagattcttg

SEQ ID NO: 14819 - DNA, 557 bp, Glycine max
  misc_feature (47)..(47): n is a, c, g, or t
  misc_feature (49)..(49): n is a, c, g, or t
  misc_feature (316)..(316): n is a, c, g, or t
  misc_feature (388)..(388): n is a, c, g, or t
  misc_feature (429)..(429): n is a, c, g, or t
  misc_feature (433)..(433): n is a, c, g, or t
  misc_feature (523)..(523): n is a, c, g, or t
  misc_feature (529)..(529): n is a, c, g, or t
  Coding DNA Sequence Number=SeqID_5040
gtagtgagagtgtaaataccatcatagatatacattatataatatcnantgtaatgctagtatctgatgtgtgtcttacatatggtatgatattgtataattgtaattaggtcttatagaagagagtcgagcacagagtgaaaacacatagtgatgtcgttaatcgaagaggagcgagagcgcgtgttagcagaagagacgcgcagagcctcgctaggatagctcacggactagcagtagagagaagagagatacacagatacgagacaacaatattagacataaagaactcatagacagaacataataaacagancgaatagcgtgtgacacgagatgagggagaccccaatataatgatgatcacacggagatatgacgtgcatgntgtacacccacattggtatattcacatctagcagttaattntgtngtatcacagactatacagtactgttagtatgtagtgttagtttggtgacgatacatgatatatgagagagagttcgttacggctgtgaangagagnggagcgcgcatgtaaaagacgagtgcta

SEQ ID NO: 14820 - DNA, 252 bp, Glycine max
  Coding DNA Sequence Number=SeqID_5041
gaaatggatcaactatatatgtaaaaggcaatacactatatatatgtataaatatatataagattaagaagctctgctgaggagtgtacagagtagttactattttctattcatggttggagtttgaggcctcaggagctggcgaaatcgagcccttcttagccgtggactcaacaaaatccaccacaacctgcttcacttttttgtacaccatctgcttcacagaaactctctctttagggaagacgctcc

SEQ ID NO: 14821 - DNA, 471 bp, Glycine max
  Coding DNA Sequence Number=SeqID_5042
tgagtcatacatatcgtcgattcatcaaagagtgaaggacattttgatcctctgatgctggtgtcccagcaaatcagaggtagtccaacttattccaaaatactccgtcgacagagtaaaaaaagattgcaccgccgtcgacgacggcgccttgccgacggaacgatgcccgacggctcctcccttccttctcgattccgacccctagtccctcacctccgactcggtccagtgcgccataaaaatacagatcggagtgagtgcggaagacacgtaattttcaggatactgttgcgatttcagatctgagtttgttatttcatgatctttgttgtttttttcggatctgggcttgttctaccgctctcgtgcggcggttgaagatgacgatttgggattaggtgtsctgggtgcttatcggaattctgaatcggagaggtgttctgtgggtcacaccaccgtgcaaggctt

SEQ ID NO: 14822 - DNA, 488 bp, Glycine max
  misc_feature (160)..(160): n is a, c, g, or t
  misc_feature (223)..(223): n is a, c, g, or t
  misc_feature (453)..(453): n is a, c, g, or t
  misc_feature (458)..(458): n is a, c, g, or t
  Coding DNA Sequence Number=SeqID_5043
ttatgtccaccaccacatagtaggtatgtaatagcacacacacaatagagtgaacacgtgcggctcacgcacatcacatccatactatcgaatgagtattcgcacgcaacgcatctcgcacatgttagtttatagccgagcaccaacgccgcgtagtatnacgtccgtatatacaccagtacactcaccgtcttgcgttgaccacactcgcacgcgccgcgtngttcgtccgcgcccgatagacgtctgcagtagataaatgctgatgtgttatatcctcctccctcttatatatatatcgcctcattaccgtccgccaacatatgactagcgacagtcgccgctggcgtcgcgtctctcgcgttatatacacacaagagacgcagcataccatattcgtatgagaagaacgttcgtgcatttagtctagaccctacacatgctatgactatntgtanactacgatcgacgccagataaactgtctcg

SEQ ID NO: 14823 - DNA, 534 bp, Glycine max
  misc_feature (33)..(33): n is a, c, g, or t
  misc_feature (184)..(184): n is a, c, g, or t
  misc_feature (191)..(191): n is a, c, g, or t
  misc_feature (218)..(218): n is a, c, g, or t
  misc_feature (274)..(274): n is a, c, g, or t
  misc_feature (369)..(369): n is a, c, g, or t
  Coding DNA Sequence Number=SeqID_5044
gtagtagagctatcgacctgtatatattcttgntgtatatccggtactgactcgctggcgtttaatactatatgttatgctgctcagcggatcatctcagatcattcaggaaagtcatagtgaatgagatgatgattctgatgtgacaccgagttcaatacatacagtgcaagatcgcgtagantctgcgnataccgacaagctatagtacacacaancgtactttcatatactatctatacattatacacatgagagatgataacgtagacantcacatatacaccatgattaatatcaggagagaccgagaggagagatgtggacaggtcggactgtacgttcaactgcgtgaagctccagtaagcnagtataagcacgtatgctatcggtctatatatgttatgtgacctcaacgaaagttagctgataatagaggtgtgatatgataccgaagaacgattagcgatatctcagtaagaaatttctctctaatttattagcagctgcgcgcgatcatagcgggcactggac

SEQ ID NO: 14824 - DNA, 586 bp, Glycine max
  Coding DNA Sequence Number=SeqID_5045
tgtcctctgatgctcgtaatctagatgctgtttttggacttgctgataccccggaaggacgagatgtagctggtgcatggcttagagaaaattgataacacctcataacaacatatggttcaggatttttgataactcggtctgtcagttcagttgtctcaccgtttgcttcccttgacaaggcctaggaggtagaggaattctttgctacccacgctatgccgtccatgtgctatgaacgttcatggagagcctgtcagcggctcaatatcattgcaaattgggttcagagtgttcagaacgaacataggcttggtgatgctctcaaggaattggcatacatagcttactacgtctcttgtctagagcgcttttccataatcaaaaacagaaacgtggtggctatttcaactttcttctgactgtcagagataccgtctattgctaagcatggaccttgccagttgcctgacatgagaataaatgatttgtgtgcccttgttagatctgcatcttcacgattgtggtttgatatgacaatatacctgcactcttggatatgtgcgggcaaatttcgtaaacgata

SEQ ID NO: 14825 - DNA, 178 bp, Glycine max
  Coding DNA Sequence Number=SeqID_5046
tgcctgccgtagactttagaggatccccctgcttgccacattaggggaggtggatttaataatgctctacatatagggagcggatgctctttcacgaccttctgattggacatacagagggacctgtattctttttcgggatgctgctggtgctgaactaatacagggcattgccgaa

SEQ ID NO: 14826 - DNA, 516 bp, Glycine max
  Coding DNA Sequence Number=SeqID_5047
agaaacgcccttattgtgctcacaaagataactagtatttttcctgtcatgcgaaaaagcggtatcaacatcgagaaaagggttgcgaagctaaagggggatgagagggaagatctgaaagtactggccactggtgtagctgctgctctggcagctcgcaagagttcatgggtatctgaagaagagtttggcatgggtcaccttgatctgaagccagtacctgcaaaacctattgctggaaatcagtatgcagatccctcgacagcaaaagatcatagcgtccgtgcaaaatctgtagagggtaggcatgaaaggtcagaaaatgcaatgaagcctgatgctcataagaagaatgcctcgactacaaacggatctgatattcaaatgccatcttcctctgcacaaggaaaaggttcagggcttgtacgtggtgtagatgaacctccaaaacttttgtccgatgatggagttaaagtcttgaagcctactgcagaacctgagacaagagcgccacaa

SEQ ID NO: 14827 - DNA, 599 bp, Glycine max
  misc_feature (40)..(40): n is a, c, g, or t
  misc_feature (58)..(58): n is a, c, g, or t
  misc_feature (97)..(97): n is a, c, g, or t
  misc_feature (99)..(99): n is a, c, g, or t
  misc_feature (147)..(147): n is a, c, g, or t
  misc_feature (284)..(284): n is a, c, g, or t
  misc_feature (287)..(287): n is a, c, g, or t
  misc_feature (304)..(304): n is a, c, g, or t
  misc_feature (323)..(323): n is a, c, g, or t
  misc_feature (367)..(367): n is a, c, g, or t
  misc_feature (372)..(372): n is a, c, g, or t
  misc_feature (423)..(423): n is a, c, g, or t
  misc_feature (433)..(433): n is a, c, g, or t
  misc_feature (492)..(492): n is a, c, g, or t
  misc_feature (515)..(515): n is a, c, g, or t
  misc_feature (532)..(532): n is a, c, g, or t
  misc_feature (559)..(559): n is a, c, g, or t
  misc_feature (573)..(573): n is a, c, g, or t
  Coding DNA Sequence Number=SeqID_5048
cgctgatagtatacacatgaccgatagcttgctcatcacntcagtactcgtcactcanccgctaagtgcgatcgatgtgttggatgagtgctaacananagacatcatccactctctatcgccttatagaccatcatgcaacaactnctatacaatctacatgactatcaaataaatacatcactcatcacgtcacactactgaatacactatacgatgcgtcgttaatacgactgctacgccgacatgcactctgacacgactctctacatcatcgcgagctngcngcgtctacgtagcgtgncgatatgagagtactgacngcgactcacacagtctacgagcaggatactacgtagatgtatanatcgnaaatagtgaccgtctgaagactgcatatcgtataatgcgctagcatactantatagtcatncagcatcgtctctgtagtactcactcaatcccatatcgcatcgcatcgtgcgtgctctncgaaccacgtactgatggatgtnagctgagatagagacgncgacggcctcgcagtgtatactcgcgncatgaatgtgctanttactgtcgctgcgtagtagcgcatc

SEQ ID NO: 14828 - DNA, 556 bp, Glycine max
  misc_feature (165)..(165): n is a, c, g, or t
  misc_feature (278)..(278): n is a, c, g, or t
  misc_feature (282)..(282): n is a, c, g, or t
  misc_feature (284)..(284): n is a, c, g, or t
  misc_feature (294)..(294): n is a, c, g, or t
  misc_feature (342)..(342): n is a, c, g, or t
  misc_feature (445)..(445): n is a, c, g, or t
  misc_feature (453)..(453): n is a, c, g, or t
  misc_feature (468)..(468): n is a, c, g, or t
  Coding DNA Sequence Number=SeqID_5049
gatatatgtaagtagtctgcgacactaatacatatagtgacaacgcgtgaatatatctactcatcaccacacatatatagtagactatccagagtagaatctcagattatcaaaccgccgtcatagatatatgatgacatacgccaagcgcgcgcatctgcttcntgatcattgatgtagaatcatgattaaatataacattataaaacgataagaagagataaacagaaaagtagagtaaagcaggcgaagacaatgagagtgtaagcgaatgttcntcancnccattgatgntgtattgcgagtcgctggccacgctcaacgcgcccgcactagctgaangacacaataagcgagatgagtgtcagcctatagggagtagaagagcccgatcacgttagataatagaacaaatgactatattagagataataatattgtctcnatagattntagtatacaacaagngcgacacagctctaaaagttaggtgatagtaattgatagtgtgggtgcacgcatatcgtaatgagtaagagtgttagtacgatctcca

SEQ ID NO: 14829 - DNA, 365 bp, Glycine max
  misc_feature (26)..(26): n is a, c, g, or t
  misc_feature (38)..(38): n is a, c, g, or t
  misc_feature (59)..(59): n is a, c, g, or t
  misc_feature (64)..(64): n is a, c, g, or t
  misc_feature (82)..(82): n is a, c, g, or t
  misc_feature (101)..(101): n is a, c, g, or t
  misc_feature (139)..(139): n is a, c, g, or t
  misc_feature (220)..(220): n is a, c, g, or t
  misc_feature (314)..(314): n is a, c, g, or t
  misc_feature (322)..(322): n is a, c, g, or t
  Coding DNA Sequence Number=SeqID_5050
gggatcgctcatcagtatgtttgggntatgattttatntaacatctctccctcactccncgccncctcacttctctcatatntaacacataaaactttatncacgcgaccattcgtcgtcgtgagctcgtctgcgtacncgagcatattagtatagtagatgcatatataatccgagtgagatctgagtgtcacactaccgcctccatctcacacagtanctcgatgttctcgcgtctctcgtccacagtccttagagatctccgtggtcgacgcgctcgcgcgggcgtcagttctccttgcgtcacatataanattctgcngtggcgtgcgttgcagaaagtagacagagtaagcaagcgagga

SEQ ID NO: 14830 - DNA, 571 bp, Glycine max
  misc_feature (122)..(123): n is a, c, g, or t
  misc_feature (126)..(126): n is a, c, g, or t
  misc_feature (129)..(129): n is a, c, g, or t
  misc_feature (131)..(131): n is a, c, g, or t
  misc_feature (150)..(150): n is a, c, g, or t
  misc_feature (157)..(157): n is a, c, g, or t
  misc_feature (162)..(162): n is a, c, g, or t
  misc_feature (305)..(305): n is a, c, g, or t
  misc_feature (373)..(373): n is a, c, g, or t
  misc_feature (375)..(375): n is a, c, g, or t
  misc_feature (407)..(407): n is a, c, g, or t
  misc_feature (414)..(414): n is a, c, g, or t
  misc_feature (416)..(416): n is a, c, g, or t
  misc_feature (418)..(418): n is a, c, g, or t
  misc_feature (420)..(420): n is a, c, g, or t
  misc_feature (426)..(426): n is a, c, g, or t
  misc_feature (439)..(439): n is a, c, g, or t
  misc_feature (446)..(446): n is a, c, g, or t
  misc_feature (460)..(460): n is a, c, g, or t
  misc_feature (470)..(470): n is a, c, g, or t
  misc_feature (483)..(483): n is a, c, g, or t
  misc_feature (487)..(487): n is a, c, g, or t
  misc_feature (520)..(520): n is a, c, g, or t
  Coding DNA Sequence Number=SeqID_5051
tactaagctcggcacggagagtccttctctgcaccccgcgcattacatttcaatctctcactctcttatataataatattagtaggcgaccagcggatggagacgctcatgtgtgaccctcnnctnagntnggctcgccgaaggaggcgnggtgtgnagtgngtgttaagagagtattgatatatatatctatactatatttatcctataagagatgatcgaatcaatacaaagacatagtgagcagagagtgatcgcaactaacgatgagggagagagtcactcccaccctgccagctactcangctgcgtggggtgtgtgtggccttcgtacatcgtacatactcacacttacgatacgacagtctgacgnanacgactcaccctcatatcagcagagaaaaccngagcagnanantnaggcgngcctcgtcctcgncacacancacaacctaaacancgcccccccncgttgtcctgctnttantagctgggcgggtgtagttatatcgtagggtanccccactgtcgtgtgcttaagttatttggtgagcgatcagcacaccacaag

SEQ ID NO: 14831 - DNA, 451 bp, Glycine max
  Coding DNA Sequence Number=SeqID_5052
gataccaaagaggaaatgcgctcctctgcggaagccccagaggggcggggggggctccaacccaagaaaaaggggggcggccaaaattccccccgggcaagggaaggctcgccctgaaaaaccccaaaggcccaagggccccaagccaaaggccagggctttaaggaaaccccaagaggggcgggctaaacccggagggcgtttttccaagcccccaaggccaaggcggcctccaaaaaagggggcttgtgctgcggcccggaaaaaagcctgttgctcgaaacccgccccccccaagagggccgacgccggggaagaagcccggtccgcccaaagaaggcctcggccaagaaggccaagaagttagaggccgctggacggtcctagatgccctggcggtagtattgagtagcctagttctctgtcgggggttgtcgctcaagagcttctt

SEQ ID NO: 14832 - DNA, 359 bp, Glycine max
  Coding DNA Sequence Number=SeqID_5053
aagtcagcgtgaacttaacggttctggacttgttctgaatcttcagagctaacttttgagatcagatcccctaaatggctactctctcagtgcctagttggggttccagttccaccattctaactaaccctcaaagcgtttaactgtgcatactccaagccagtcagattgctttgttgcgttgccctttttaggacttcaagtccatactgtgagagtgtgatggcttaagaggccttaacccctctatgtaaaaccgcgagtatattgtatcaatattttctgaaaatattgtatattaatatatctctttagcatgtagtaattgggtcaagttgtccccttctctgaaggctaaa

SEQ ID NO: 14833 - DNA, 573 bp, Glycine max
  misc_feature (72)..(72): n is a, c, g, or t
  misc_feature (224)..(224): n is a, c, g, or t
  misc_feature (271)..(271): n is a, c, g, or t
  misc_feature (305)..(305): n is a, c, g, or t
  misc_feature (456)..(456): n is a, c, g, or t
  Coding DNA Sequence Number=SeqID_5054
ggatgacgatatatccccgtctacgcaccgtgctagagactacacgaccagtcacgtttcagcagtcacgcncgcgcatcccttgccgcgatcgacatccggtgcgcacacagagcatgtagtcgtataaacttgaatatgcgagcagtgtggatactgctacttaatcacccctcacgacgcagcgttatacccaccactacactctctcctatacctatacngcgacaatagcatacgcgccgccctccgacacgcgcgtacgcgctantacaatatgctaaatgctgtgccgcctcgtagcnttacctctctactaatgagcttcactcatccgcagagtgaacatactatggtgatatacacaactgtacgaacaccttacacattacgtagtgcgttagatgctacaatcagattcattcagggctgtgcttatcgtgtgtcctctcgagngtgacgacgccggcggagaatatacacgaatagactcatcgtatacataatgaggataaagtgcagcgttcatacaacatacgctctgcgtgagacatacatcacgcgcgagtcgta

SEQ ID NO: 14834 - DNA, 413 bp, Glycine max
  misc_feature (61)..(61): n is a, c, g, or t
  misc_feature (98)..(98): n is a, c, g, or t
  misc_feature (102)..(102): n is a, c, g, or t
  misc_feature (104)..(104): n is a, c, g, or t
  misc_feature (122)..(122): n is a, c, g, or t
  misc_feature (206)..(206): n is a, c, g, or t
  Coding DNA Sequence Number=SeqID_5055
attatattccgtcctcacgttctctccatctgtgtgtgatggtcgtgcctttgtgttggtnttagtacatgattcgttgtatcgtctggcgtggtgangacnangggagtgtgaggagcgcncgtcgtgagttgcgtcaagcattcgccgtagttgctagtctcttcggtgtcacatcgatgtcggagcagcctcatgatgatgancggtgtgtatgagggatagatgaaatcgtgcggggtgctagtgtcgtggcgggaggggagacgtacagtcggccaggcactgcatgagtagcgcgtgtgcagagatggctagtggaacgccagcgattatgcgtaggaaccgaagacgtcgtgcgtgttgtagcactgctgggcgtgtgtgtgggtgtagacgacatcttccggaaa

SEQ ID NO: 14835 - DNA, 241 bp, Glycine max
  Coding DNA Sequence Number=SeqID_5056
agattttgattatgacttattttaaataggttaatttttttaaccagccaaaaaaaaaaaagagtaaaaggtaaatattaaaggcctgattatgcatttttatccacatgatgctggcggagtcagagcacataatcaactcactttatcctgaattctgggggcgacagggtttggatctatatatctcgatgcatgtttggaggggcaaaaattatgccgtcccggtctcaatacttga

SEQ ID NO: 14836 - DNA, 548 bp, Glycine max
  misc_feature (26)..(26): n is a, c, g, or t
  misc_feature (35)..(35): n is a, c, g, or t
  misc_feature (78)..(78): n is a, c, g, or t
  misc_feature (80)..(80): n is a, c, g, or t
  misc_feature (141)..(141): n is a, c, g, or t
  misc_feature (177)..(177): n is a, c, g, or t
  misc_feature (461)..(461): n is a, c, g, or t
  misc_feature (467)..(467): n is a, c, g, or t
  misc_feature (484)..(484): n is a, c, g, or t
  misc_feature (489)..(489): n is a, c, g, or t
  misc_feature (501)..(501): n is a, c, g, or t
  misc_feature (509)..(509): n is a, c, g, or t
  misc_feature (518)..(518): n is a, c, g, or t
  Coding DNA Sequence Number=SeqID_5057
agagcagtgcggtgttgcatctgacngcgcggcgncgggtgaaggcagagatatagcgtatattgatcatacttcgantntcctctaccctacagctcacgtcggtaaattagttatgctatcatacgatagtatagtatngagatgtaggatagaatagaacaagatcatacgaantatatatgtatataattatcgtattatatatatatagtatttacctaatcaatataactcatatgtatgagagagatatcgaatgtattgttcatatagtgtaatgtcctagtgtcgctcatgtattatcgtcagtagcgtgggtgctaggcgccggggagtggagtgaagctgtatgttagcacatatgagtgagctaatcactctgtatatcactattatctagatgtgttgttggagtctattcaactcttcagtcaaaataatcatcccctttagtttcnttcttngagtatcaacgtacgcncgagntaacgcgctatngtattgtnagatatgtncttattacctttctcctttgtagacgaaga

SEQ ID NO: 14837 - DNA, 538 bp, Glycine max
  Coding DNA Sequence Number=SeqID_5058
ccacttgctagttctgcgaacttgatgagttctttcttcccaaagatgctaagcacaaagagttcaaaagatcttcattgcttctcaagcaaataccaaagtcatactggcaatttcttcaaggctcctgaagtgaagactacaaaagcagatgtctcacataaaggctgtataaatgctatgctgtcaactatgtcgagccttcctgataaatcgttgatgagcttaaagtcttcatattcagtcttccaaagtgatcccgaaaagatgaataaatccaagacaaagttgatgaatttacgaagcactttagagacttctgaaaatcacagttctttgttgtcttcaattcctgcagaggctcctccctcaacttcaagaggtggaagcaaatctcgaggaggcaagaccaagaccaactcgctttatcaaaagactcgagaggatttaatgaatagattgcgaagctcaagtggcaagagccagaaaagtcctgctatgagcccattgagagaatttgcaaaagttccgttgacaa

SEQ ID NO: 14838 - DNA, 483 bp, Glycine max
  misc_feature (44)..(45): n is a, c, g, or t
  misc_feature (68)..(68): n is a, c, g, or t
  Coding DNA Sequence Number=SeqID_5059
ttcggctcgagggtagggatccaacctgggagaaccctttgagnnagtttgtttggtttatcagagangggcagattgttttggttgttatgggacagcggtagcattttattccatttgggagtggaagaagaacgtgtcctggtgcttctctagcttggcaggttgttcctgtgaatctggctataattattcaatgtttccaatggaagcttgttggtggcaatggctaggtggacatggaagaaaagtctggcatccctctcccgacggctagccccataatttgggtccctgttccaaggattaaccccttccctcctatgtggttgaatgctattcatctggccccgaatgttattcaataaccagtgggggaaaaaaataataattacccatatggtctgataagagaaaaataataaagccggtttcttttttaggctaaaaagcaacttttatttcccattgtataatttattg

SEQ ID NO: 14839 - DNA, 347 bp, Glycine max
  Coding DNA Sequence Number=SeqID_5060
gggtcagattttgggtttcaagaagataggtttcagggcagggttccacccctttttcaggtcatttattctagctccctgggccccaaatggtggggaagcaactttcgcaatcaaagaagccccccctaagaagcctagaactcccttttttgccatttttgggatttatgggggggggttcatgaaaaacattttcggtttttttgcaatttcggttttgatttttgggggggaagtcccttggcaattttcaggggaattgcgggttgttgcaattttttgggcaaaaacgggccttaccgcaagttttcccccccttttccccaaagggtcatccttcattg

SEQ ID NO: 14840 - DNA, 524 bp, Glycine max
  Coding DNA Sequence Number=SeqID_5061
gatgtgagaaaccaactctataagatgagagatcctcttgaagctgtgcttagaagactatcagagactaacttctgttcaatttccaacttggtgattatggagaactttattttgaatgaacagaccatcgactattacctatcaatttttgaagcaatgattaacaagcttgttccttatatttccaagaagaacaacaacaagaacttcatgacaagtggtttattgtttgatgaattgaatgtcaagcagttgaagaaacaagcaaatgagattccaaatgttaaggatttgacattcactgaagaaagtactttggaacaaactccattcttggaggaagatagattgcaattgattgctctcgaagtcttggataagtacagagaaagatcaataaataatggatatcaatcagtcgaaagaccaaacaaggaggcctctttcctttaagaattctttttctctaatataaaatgagtttatttttcacattttttttcttattcgcatcgactttt

SEQ ID NO: 14841 - DNA, 377 bp, Glycine max
  misc_feature (35)..(35): n is a, c, g, or t
  misc_feature (44)..(44): n is a, c, g, or t
  misc_feature (175)..(175): n is a, c, g, or t
  misc_feature (204)..(204): n is a, c, g, or t
  Coding DNA Sequence Number=SeqID_5062
caacagccttctcgccaaaagaagtgagctcaacnaatttgatnatcttttggtcaagaagcacaagacccaaagcactcaagcctctgaaaccaactctgatgaccaatcagttacttccagagataactttggaggagctgactttgccatccttgcctgctcagaaactttngaggaggattcacaagcctcttcaacttngggcactccaagaagacaagtctctgaagaaaatcttgagggcctcagtgttcttcaacaagcattgaaagctctcgaattaaagattaagatgcaagatgaacaaagcaagaagaaggagattgtccttgctggtcacagagctgcttatgctatccctgttttccaagaaa

SEQ ID NO: 14842 - DNA, 352 bp, Glycine max
  misc_feature (263)..(263): n is a, c, g, or t
  Coding DNA Sequence Number=SeqID_5063
gcatgtactagtgagggctaaagatgacaaatgctttgatggaaacctctcgacttagaaaactccatagacgcttgaaacccacactctctgaagacaaatgtccctttgagagaagatccagatgcatttcgctttggaatcctgaccacataagtgaggatgtgagtatatctgattcatgaaccacaaataagtatatagagagaacattcgatgtttatagagagatgctttgaggtgaatttatatatggaaaatanattatgcctctatatagcgatgaatataacatagtatgagttgatgcacccacatcctatacttgacgagatcacaaagtatacctaca

SEQ ID NO: 14843 - DNA, 560 bp, Glycine max
  misc_feature (455)..(455): n is a, c, g, or t
  Coding DNA Sequence Number=SeqID_5064
gttacaacaccgtagctgagtcgtatgccagtgattgcacccggcaatcgcgcgcgtgtgagctacagcgacctcgggtaggaacctcttatcggcgatatcttctcgaatacgctgcaccgtgtaggaggtgacacgatgagcgctcgcgcacagcgatatgagatccacaccgagctcgaagctgtatacacttcatcatgctcgctagcgggcagaccttctctcatctaagtcccatatatgtctgtgctcatagtctgtagatgagactcgtatacatcaacttctctgatgaatgcttctcacctctgcgtcccccgcctcgactataccaccactgaacgcactctgtaacccataccatggatctctcgccatcacagagctcttaatgctctcatcatcacgctcacctacgtacatttctcacttctcacactccctcacgagcngccctcacatcttattcaacatacctctacagtcgtaaacacactacctctcacaattgaggcgagcgtcctgcttatagagttacggtcgacagtatcctcggc

SEQ ID NO: 14844 - DNA, 592 bp, Glycine max
  misc_feature (26)..(26): n is a, c, g, or t
  misc_feature (50)..(50): n is a, c, g, or t
  misc_feature (80)..(80): n is a, c, g, or t
  misc_feature (137)..(137): n is a, c, g, or t
  misc_feature (199)..(199): n is a, c, g, or t
  misc_feature (201)..(201): n is a, c, g, or t
  misc_feature (218)..(218): n is a, c, g, or t
  misc_feature (234)..(234): n is a, c, g, or t
  misc_feature (254)..(254): n is a, c, g, or t
  misc_feature (271)..(271): n is a, c, g, or t
  misc_feature (275)..(275): n is a, c, g, or t
  misc_feature (294)..(294): n is a, c, g, or t
  misc_feature (317)..(317): n is a, c, g, or t
  misc_feature (344)..(344): n is a, c, g, or t
  misc_feature (355)..(355): n is a, c, g, or t
  misc_feature (388)..(388): n is a, c, g, or t
  misc_feature (416)..(416): n is a, c, g, or t
  misc_feature (421)..(421): n is a, c, g, or t
  misc_feature (441)..(442): n is a, c, g, or t
  misc_feature (446)..(446): n is a, c, g, or t
  misc_feature (448)..(448): n is a, c, g, or t
  misc_feature (459)..(459): n is a, c, g, or t
  misc_feature (476)..(476): n is a, c, g, or t
  misc_feature (499)..(499): n is a, c, g, or t
  misc_feature (507)..(507): n is a, c, g, or t
  misc_feature (520)..(520): n is a, c, g, or t
  misc_feature (531)..(531): n is a, c, g, or t
  misc_feature (554)..(554): n is a, c, g, or t
  Coding DNA Sequence Number=SeqID_5065
gcctgcgtcactcgtagtgctagtanctattgctagctctatacgtcagncatgcgtgctacacactcttagatcgtcgngacgcaccacgatctgctcgtgctacgaccatttcatcatacatgcgctcatccatngtatactccgatcgcgcagcacgaagacgatattacatctactgtctgaatcgtgactccgncncgattactttgtgtacngacatcgatgagtgcnacacattcgtgctcactgtnatgatactgttgctcangtanctccgtatatgctgtcacngcggttagtgtcacgcatgctgnatccacagtactaccagaccatgtganttatacgagancgattacgagatcaattatcatcatcttgcgtntgatgctgatatgttgcattattcatcnacttnttgtagctgataatgtggcnngcgncngcctgtgtcgntcagcgtcaggacgtgncgacgatacatgcgatgacgtantcacgttnggtgccacgcagntctcgacatgntgtacactcatccatcacttacngaaccgtattaccattgccgcgcgctaatgttggtcct

SEQ ID NO: 14845 - DNA, 265 bp, Glycine max
  Coding DNA Sequence Number=SeqID_5066
aacaaggttctgtgtacttgagaggaagggcagcagcgaggtgagcagaggctgccatagagcgtgattgtgcaaatctcgaaggaacagattcgggcactgagcaaacgtgcctaatctagttcgaggagaaccatgggttcttgagatgagccgtttaacttgagacgccgggacctcatctactccaacaagcttggcaagtgttgttggatcaccccagagaaataccggcagcatagagactatgatatctacctcagta

SEQ ID NO: 14846 - DNA, 521 bp, Glycine max
  misc_feature (96)..(96): n is a, c, g, or t
  misc_feature (127)..(127): n is a, c, g, or t
  misc_feature (191)..(191): n is a, c, g, or t
  misc_feature (289)..(289): n is a, c, g, or t
  Coding DNA Sequence Number=SeqID_5067
atatacgtcggaaagggcgcagcgtacgtatgcggcagagtaacgcatccacggccgttatattatgagtgggatcgcagatcatgtagtgcgctntacacgtcgcgtgttggcgcgcatacgacgncacaacacaaacgccacatacgacgcggggccgacaagccgaactacagacgcggtgtagttcnccgaagcctgtacgagacacacacactgctacaacgcgccgccgcaccacccgcgcccgcacacgcgaacagcgaacgaccctctctatcactctatncaccaattatgacgtaaaggtaaacgacataatggagcagcgaggcgccgatcgtgtgcgcgtcaggcataaaagccacaatcagcgcctccatgcgcgcactcgtaagagagagagagatgcgcatcgagagtcgcaaatacagataaatatacccaacgcgcctccccgcgccgccgagcgcgcactggcttgcgagggcgacgcacacacacgtatccagtcaagttgc

SEQ ID NO: 14847 - DNA, 598 bp, Glycine max
  misc_feature (415)..(415): n is a, c, g, or t
  misc_feature (528)..(528): n is a, c, g, or t
  Coding DNA Sequence Number=SeqID_5068
gattcttcttacatagaggcgccatccccatgggaggcttataaaaaaacgcaagtgggtcgatctactcgctacataacctaggaaatcttttctttaacacagggagaagagcgtgtaaaccttaacggcggcgggatgaactaatgtcaactagaccgtcgccttggcaagagcgggctcgcgtccctacaagacctacatgtgcacctagggaaaacaccgcaaactatagcaggggtgcgcacctatttgtctccgttctgacagtaaagtaataatagagcgggccgactacaaatagagacacgtggcagcagaagtgacatgaatgctcttacgaacgcagccctgcacaagtgcttcatccgaacgagaacacatcagcgccgctctacctacgtcgccacagagntgggctcgcgcaagacgcacaggataccgatacacagattgcctctctcaggagagcccacgtatgctgggagtataggtcttacccataccctgtgagacgctggtcgaatntattgtatcatagagtgtctattgatcgaatagtgtgtctactccgcacacacggcatctgactttatgg

SEQ ID NO: 14848 - DNA, 565 bp, Glycine max
  misc_feature (96)..(96): n is a, c, g, or t
  misc_feature (377)..(377): n is a, c, g, or t
  misc_feature (382)..(382): n is a, c, g, or t
  misc_feature (491)..(491): n is a, c, g, or t
  misc_feature (509)..(509): n is a, c, g, or t
  misc_feature (533)..(533): n is a, c, g, or t
  Coding DNA Sequence Number=SeqID_5069
gtgtgtagccaatgtcactcataagagcgtattgatagaggaattggtgtaatactagacaatgtcgagtacgggtcagtgcgtctggtgtgtgangtagatcggagccaccatcgtgcgcttcgtgttgtgttgcgtggtgggtggtagaagcggcgcccacgcaggacgcaaacattaatgttgatgttagtcagtgcggcgctgtggggagtcttagacgacctgtgacatgtagagcgatgtagatgttatgcggctgtatagacaggctatgattgtaggggcgctcacgtcgtatgaggatagtttgtggtgcgagtgatcatcagtcgtattacatattgcggtgaatgtgtaggttatatagatgatanacatntatgattgataagcgttgttagtatttgttaatatgagcgagtggttcgtgagtgcgatgagtgatgtgtggcttgatctcttatggaacgttcgtaagagggtagganaaattatactgagcagtnggtctctggagggtctgtcggttnactatgtgagctatactgacacgtagatgcgt

SEQ ID NO: 14849 - DNA, 498 bp, Glycine max
  misc_feature (206)..(206): n is a, c, g, or t
  misc_feature (275)..(275): n is a, c, g, or t
  misc_feature (306)..(306): n is a, c, g, or t
  misc_feature (465)..(465): n is a, c, g, or t
  Coding DNA Sequence Number=SeqID_5070
aacacgacatgttactagatgacaatatccgagagaataccacaccacgcaccacaggaacaaggtgcaagaaagtagaatgatgaagtatatagtgagagacgtcgacagagagagcacccgtcaggaggtgtagcgccgtcgggcccgaggtgagaaagcggcgaagtcatattcctcacgcgttaatatagttcgactgatanttgtttgagtctattactcaccagggatgtgcttatataggcggagtgaggagaaggaggatgtgtgtnccccctgctcggataactcttgaacttatangaaggagaggggggcccctcggtttacgcacaatatgtcgggcgcactagaagaggggaggagtgtgtggtagttctctacttatattgtaagagcgagtgtcgtgcgataaataaacacaaacagtagaacacagaagaataaaagtagtatattgcngcgaggaggccgttctgtcgtgtgttgaggtac

SEQ ID NO: 14850 - DNA, 517 bp, Glycine max
  Coding DNA Sequence Number=SeqID_5071
gggaatatatatcgcgaccatgggacgcgtgtattgtctgcggataagagtacacggcgataatcaggatgaatgaggagagcaaagaaaatattgtacggtctgctctcttcttacgtctttgacacctcgggagcgggaaaataaaaaagagggcgcggcgagggaggccaaaatacttcaataatttaagaatgcgggaatcgatggtccttgcgtgcggaggcgggctacgcttagtaaatagactaaacataaaacgctcgtccgtcctaggaacctgctagtgggaataattttcccattgttacctcactttttaatttataagcgcgcggtccggggcgggtatttacacaccaccctacatacggagaggaagtaccaaacaaaatatttgtgaaagaggacgataccccccgccccccagagtgcgcttgcaccctctgattatgacgcattacaaaacgcgaggaagaagagagggcccgggaaacgcggtgggtccaacacgaga

SEQ ID NO: 14851 - DNA, 561 bp, Glycine max
  Coding DNA Sequence Number=SeqID_5072
acttttcaatcaataatagctttataaaatgtttataaatcaacaataaaataaaatttgattaattaaattgatttttaattttttctgtgataaaaaattcaatatgcttttgtttttaaatttaatgtatattttgtattgtctatatgataatttttattaattaaaatattttcttaaatattttttacacgtgaggtcatgttttaataatctcatgtaaaatttgtgtttattagccgtgctaaattatgaagaagatgtggccatgtacactattaaagtagtaaatttatccaataacatacaatcgagttgttatttaccgaccctcgaagaatatcgtatcacaaaatgagttgatagcactgtggaagccaaaaagtggccagaatttttggaaggatttttttttttggtgaggaagagattgtcaatctattgattaatarstgtgtaaatactaaagatatataaactttgcattttcgatgagttgactgtgatacactaataaaaaacaattttatcttatcatctaattacacattatcgtta

SEQ ID NO: 14852 - DNA, 182 bp, Glycine max
  Coding DNA Sequence Number=SeqID_5073
ccaaagaactggagatgagatcatctgacagatttaaacgttccagatgacagtcctatgttgcgatcacatggaatcattgcctgaaagtgcctgagaacgtaaggcacagggaaaactgatcggaaaggggatgtagcttgaaaccgaacttcgttgaaacccgagtttggtggcaaccg

SEQ ID NO: 14853 - DNA, 207 bp, Glycine max
  Coding DNA Sequence Number=SeqID_5074
ttttctccttaataagagggatacaaccccccccccgcgggggcctttttcattacttcccatgcgacctccttactcatccccccacatacccttgtaccccccccatcttcctctctgtccataaacccgcccccccagttcccttcacctcccccaccctttccagctttaccgctatcacgaacttatcgctctttggcctcc

SEQ ID NO: 14854 - DNA, 495 bp, Glycine max
  misc_feature (466)..(466): n is a, c, g, or t
  Coding DNA Sequence Number=SeqID_5075
gagttggtaagcacccttacgtgtccctttcgtattggatttctcatttatgtctctctctctccttcgtgcgcgttttgatccgaaatcagtttttctcttcctcctcctgtcccgatcactccatcttctctccagattctgatctcgatctccttcttgataagtattcattctcttttggatttccagtttttgtaatccatagatctgtcgatctagttagggtttgattgatgttcgtttgattcgagagcgttcgattttgtcgtatgatgcctccgaggttgttccacgagggtcgactcagtcttgtcctagctcacccgagtttgattctagtgtggatgatttagcttctccgaagaagtatattgtgtggagcacacagatgaacacacacgtcttgcctgactttcttgtctgcatcaaaactccatttaacatcaaccgaagtccaaggagnttgagatcgccatggatgccatttctgta

SEQ ID NO: 14855 - DNA, 566 bp, Glycine max
  misc_feature (30)..(30): n is a, c, g, or t
  misc_feature (93)..(93): n is a, c, g, or t
  misc_feature (111)..(111): n is a, c, g, or t
  misc_feature (305)..(305): n is a, c, g, or t
  misc_feature (313)..(313): n is a, c, g, or t
  misc_feature (338)..(340): n is a, c, g, or t
  misc_feature (343)..(343): n is a, c, g, or t
  misc_feature (361)..(361): n is a, c, g, or t
  misc_feature (368)..(368): n is a, c, g, or t
  misc_feature (370)..(371): n is a, c, g, or t
  misc_feature (406)..(406): n is a, c, g, or t
  misc_feature (414)..(415): n is a, c, g, or t
  misc_feature (448)..(448): n is a, c, g, or t
  misc_feature (512)..(512): n is a, c, g, or t
  Coding DNA Sequence Number=SeqID_5076
gagagatagttcgacgcacgtgctgggtgncgctgtgcgactctcagtcgcagcatcacagtcctagtatcaagcgcggagcgcccgcactancgacaaatgtgctgaacnggacccaatatctatgtatctaagaaagcagaagggctccgatccagagaaggtaaacgcacgataatattcgcgtagcgttgcacctacgcacgatacccgccggtgtgcttttcgctcgcgcgcccctccccactcgcttgggccgcaacgcggtcctccactaggtttgagtcgtacactgtacaagtccnctaactgncccacaacaaacgcaccaccatcannnagnccctggccgcgtaatatnaccatcncnngtgctaggcgcgccgccggctcatcgcctcttcgngcgggagnngggaagagcgggggtgcggagtagaagaggaangtgtcgtctgggtgggtgtattgtaattgttgtggaaaggggtcgctggggcgtccttttgttngtgtgacgcgggagcttttagatgaacatacacgaggcggaatttaggtagtag

SEQ ID NO: 14856 - DNA, 482 bp, Glycine max
  misc_feature (52)..(52): n is a, c, g, or t
  misc_feature (334)..(334): n is a, c, g, or t
  Coding DNA Sequence Number=SeqID_5077
atctcatacgtatatcgctcgtgttgctagtgtctgtgatatactagtactnatgaatgtcctctagactatatctgactatctagcgtcttaattatatgagagtagtacatactctatgtaccacttatatccacgcttcgtgcgctacggcgcgcaggccttatagtggacgactagatggcgtcgcaccatctcgccccatacgtagacagacgactcaatccgtcgtgatgcgccgccctgagcctatcagccagtacgtagtgctacacggacgcatgtatacatgtggataagtagttagtagtccatacgttgtcgtgctgtgtgntaggctgtgttccgatctaagagataaatatatatagaccgcgactacggtgagatatagttagctagaacgtgtatatagtatcacacacactccattatacatgcagtacgggatagaagagagatacatcacgagcacgcaccaa

SEQ ID NO: 14857 - DNA, 236 bp, Glycine max
  misc_feature (173)..(173): n is a, c, g, or t
  Coding DNA Sequence Number=SeqID_5078
ttgctccaccgctcagaacacactgctctgtctccgccacgcaatacagagaggagtggccttcgccggcgacgaggctcctccctgaccagatcccgccacagtcgcggcggcaggggtcgagggatccgcggagggggccagggatttggcgttcgctacagccgagcacnaggtactgccgtgctacgactcagctcctcgccgaccggagcgaggtgccgtcgcggtccgag

SEQ ID NO: 14858 - DNA, 363 bp, Glycine max
  Coding DNA Sequence Number=SeqID_5079
tccccaggtcgaactatttgttctcacttccggcgaaatcacctcgtcgcgcctctctctcaatcaccgccacggtagctgctcccgcggaggtatcggaggaggatgacacgatggagctgaagaagtacgtaaaatctcggcttccgggaggcttcgcagctcagaaaatcataggcacgggacggcgcaagtgcgccatcgctcgtgtcgttctccaagaaggcaccggcaaagttattataaactatcgcgacgccaaggagtaccttcagaggaacccgttgtggcttcagtacgttaaagtgccgttagtgacattgggttatgagaacagctacgacgtgtttgtgaaagcccatg

SEQ ID NO: 14859 - DNA, 583 bp, Glycine max
  Coding DNA Sequence Number=SeqID_5080
aaggcgcggcgcttcggcacatatacacgacgtccgatcaatatagccccatgtattatgtttgtgcgatagtccaaaataaagccgcgcgtggaatttttcgtccccacgacctttaatatataagtaaaataagatacagcttaaatagcgattgcgcttagctatatagtataagattagagcccaaaaattcgagcatatgtgaaatcatccacaacgaactatgaattggggcgggctacctgtatcgccatcccctataatcataataagaatatagcggctaacgaataaaatgcggcgcggtggtactgcatacctatatatgttattagaaatggcaaacacgtatcatcattctggtggaggagcgagcgacctccggtgttttagcgatttttaaatttacagcgcccctctcgccaaaaatgtacaaacatattttaaggtcttgcataccgcatattatttaccaccccatataaggcaaaggggggggcgtgagacgcgccccatttccacggggatggtttttgtgaaaacttttttgttaaaatgttatatttgttgaccgcgccgt

SEQ ID NO: 14860 - DNA, 497 bp, Glycine max
  Coding DNA Sequence Number=SeqID_5081
ggtttgacacacaagatgggatgctggatctgcagaagaatagtgattaaacagcaccgtagttctacaacatccaccttgaaaggccaaagtgtgatgcggatgggtataacttatttgtcgtcgatgccatgcatacggctaactatgccagtcggatatgtcatgcatgccgaccgaattgtgaagcatacgttactgctgttgatgctcattatcaaattggttttgatagtgttcgtgcaatccaacatggcgaggatatcactcttgactacaattctgttacagagagcaaggaggaatatgaagcttcagtttagtttgtgtggaagccaagtttgccgtgggagctatctgaatctaactggcgaaggggcttccggagtggtgctgatccagtgccttgcctggcttgagcctcctggggtggcgcgtcttgcccgggcaccagtccctgtttcgccagggctctgtagccacctcggcagtgcggg

SEQ ID NO: 14861 - DNA, 430 bp, Glycine max
  Coding DNA Sequence Number=SeqID_5082
gggtaatcagcaagatcatggctcaagaggttcgcaaagaaatgaaagaagaagctgggatagaagtagtgagtttgatggcagtgacaggcccctcagaccttctaatagaaggtaagaatatggcaatgcaagtggcagcataagcatcgaaagtgtggacagtgtgcccaaaattcttggattcaaaactggattgatggcactggatcctgagaccctgccggtaagggatgttttaggaagtgttaatatttccaagattttttccaaggctccaagctagccaacaggtggagtgttacatcatggaatttggtatgttcagattttgtgaaagaactttttccttttttcttcaccatttactgcctcataatcttctcaaggaagggcctagaatgcagcgagagaacatgcctccatgcat

SEQ ID NO: 14862 - DNA, 430 bp, Glycine max
  Coding DNA Sequence Number=SeqID_5083
aagtcctccagtcttctgcgagaatcagaaaaagcgaaaatcgaaagaaatggatgcgaagatcggaaaattctttgactccgtcggttctttcttcagcggcggcgataagatcccgtggtctgaaggagatgtcatcgctggatgtgaaagagaggttcgagaggccacaaactctggcaatgaaggactgaagaaagagtgtcttatgcggttgtcctgggctctcgttcattcctatcaacaggatgatgttcaacgtgggatagacatgcttgaagcgtctcttgcgaacagtgctcctcctttggaagaccgagagaagctctatctccttgctgttggttactacaggagtggggattgctccaagagcaggcagctcattgaccgctgtatcgagatgcaacccgattggaggcaagctttg

SEQ ID NO: 14863 - DNA, 288 bp, Glycine max
  Coding DNA Sequence Number=SeqID_5084
gtaggcactttcaaatgcccctgccctatccaaggtacacccaacctgattataaggcaatcccaaagtggaggcttgcctgtttgctcaaaaaggatggctttcccatctttgggggtgttgaaaacaaaaaaaactttgccctgggggcccttttatgggaccaagtgagcttccaatgtttttaggcatattcttcccagggccctcttgaaatttggaccttgttatgtgtgatataagtgagagcttttaataatgattaggcctatagttagttaaacctag

SEQ ID NO: 14864 - DNA, 260 bp, Glycine max
  Coding DNA Sequence Number=SeqID_5085
tgggacaaaattacacacacccgggggggggttttgccccccccgccgcggaaaatattaaccaaaaaaggggggggcccgagggggtttaaaactcaaaaaacaaacccgagcacctttttaaaaccttggttttcttttggtaaaaaaaagggtttaaaggaaaaatttggacctttggggtcaccaagaaatcccaatgagtgcttcgtcccaatggatttgaccaggaggcaaggacatggtatccccgtagaagt

SEQ ID NO: 14865 - DNA, 506 bp, Glycine max
  Coding DNA Sequence Number=SeqID_5086
acttttcattttctaggttacatggttttagttgatgtgacaatgcttggatcgttgtaaggggcaactgaattattttagtaatgtatgataaactatccctttataaatgtgcagccaatctcttgcaattagctaaagaaagtggggctaatattaaacatattttatacaatgatgagaaatataaatttatgaatataaaagcattatatgcccttgtatgtgaggcattgaaacattggagtatcattgaacttctaattaacgaatcaaaaatattgatcaatgaacaagaattagacatttggcttgtcagaatattaattacagagcacatttttggaaagaagaaaattgatagtcttaatgaatttgggcgtacaattcttcaatatgaatccaagtttagagaactgctctccaaacaagattcttataacacagaccatgtaaataagaatatagaaattaaaggtaagttctactactttcagcgttttata

SEQ ID NO: 14866 - DNA, 577 bp, Glycine max
  misc_feature (75)..(75): n is a, c, g, or t
  misc_feature (102)..(102): n is a, c, g, or t
  Coding DNA Sequence Number=SeqID_5087
tgatgttgtgaacggtcacgtccccaccaacacgtctctcaccttgatgcgttttcttgtgcccacatctgtagncacataccacgcctccgcaacacacanacactcttcctcatcacctacttctcataccccgacacacgcacagagctggtgtgcaatcgaactctgctcctgtgtctccatgtctgctgttgtgtggtgtatgcgtggtgcaaacttacaaagtaactattaccatactcacctacatctaatgcacactggctgaatcgtcatggcgtaagctctcgtgactgtacatctctacgatcacttatgagataggaacacgtcctcatgccaccagcttactcttgcgggtgccagttgtcccgtgacgagctgcggcgtcgctgttgctgtgatcttgctgtcctctcaccgctgtcactctgcgcggccacagagatacctccctcactctctcttctgcctagtgacgctcacaccatgcgcaatgtatacacacgtccctgactaccttactactcgctcaacgtgatagtgtgcttgtgttcacttgtcactctatcac

SEQ ID NO: 14867 - DNA, 584 bp, Glycine max
  misc_feature (116)..(116): n is a, c, g, or t
  misc_feature (178)..(178): n is a, c, g, or t
  misc_feature (184)..(184): n is a, c, g, or t
  misc_feature (211)..(211): n is a, c, g, or t
  misc_feature (214)..(214): n is a, c, g, or t
  misc_feature (259)..(259): n is a, c, g, or t
  misc_feature (286)..(286): n is a, c, g, or t
  misc_feature (310)..(310): n is a, c, g, or t
  misc_feature (330)..(330): n is a, c, g, or t
  misc_feature (368)..(368): n is a, c, g, or t
  misc_feature (380)..(380): n is a, c, g, or t
  misc_feature (389)..(389): n is a, c, g, or t
  misc_feature (505)..(505): n is a, c, g, or t
  misc_feature (527)..(527): n is a, c, g, or t
  misc_feature (533)..(533): n is a, c, g, or t
  misc_feature (545)..(545): n is a, c, g, or t
  Coding DNA Sequence Number=SeqID_5088
atggccggtggatgtactctgactcgtagatgacttcgcttacatgcgtgtatcacattagcagcatcggaacaacgcatatcgtgactgctgtgctcagacgaaacactactatntatttgatgtgattcgcttgcacactctacacgtccgcagcgcaacgcgcacctaactcaanctaacncacgcacagctactgccactatagtanctnatcgtaggcgagatctatactaatatgtcacaatgataatcaagnaaattactctgattatcgacatatttngtttactggtctctctattctctntattctcatctatgagcccncgcatatcgacgcgctactgcagctctctccgtctttngtactactcgtntacgtatgngatttcgcgctacgccatcgctatggctcacatcgaacagatactacataccaccctccaacatctcgacctagcactacacacgacacacactatcatacttcacactcctcgcncagacgacgcactctcctagancgcaangtcactagcgangcgctagtagatctagctgtccgtcatacagtgctgtat

SEQ ID NO: 14868 - DNA, 301 bp, Glycine max
  misc_feature (225)..(225): n is a, c, g, or t
  Coding DNA Sequence Number=SeqID_5089
ataacaagcttgctgccgctcaggctcttctgacccgctcgaggctgctcttgagccctgggtatccatatgaagaaattttgaggacctttcacaatcagacaagcataatcatgtgctcctatctaccagttctcacaagctttaacagaaccaaaggcggctcgattcaattaaaccatggcaggcctcaccctctccaatatgcggccaacgcggcctttntgcctgccctatataccgattatctccgaccgctgctgacacacctggaccggatcgcggacctaacttctcttcc

SEQ ID NO: 14869 - DNA, 228 bp, Glycine max
  misc_feature (28)..(28): n is a, c, g, or t
  misc_feature (30)..(30): n is a, c, g, or t
  misc_feature (44)..(44): n is a, c, g, or t
  misc_feature (66)..(66): n is a, c, g, or t
  misc_feature (68)..(68): n is a, c, g, or t
  misc_feature (81)..(81): n is a, c, g, or t
  misc_feature (100)..(100): n is a, c, g, or t
  misc_feature (168)..(168): n is a, c, g, or t
  misc_feature (172)..(172): n is a, c, g, or t
  misc_feature (181)..(181): n is a, c, g, or t
  Coding DNA Sequence Number=SeqID_5090
gatgagtctgctctgcctgctgagatantnatcacacgccgtancgcatgatcatacttatgtcgntncagcgtatcgtanctgactagtagtgactctncacgactcatcatctactgcagtcgtatgcagtatctggcagctgcgatactctcaggaatctggatnagancagacgaangagtcgatatcactatcctgtcagacagcaatgctacgtactacgta

SEQ ID NO: 14870 - DNA, 164 bp, Glycine max
  Coding DNA Sequence Number=SeqID_5091
tatcaacaaccaccactggaaacaatccagtgctgagaaggtaacaatcctcagggccgctgtgacaccaataaatgccacgagctgtgcagcaaactctacaggcaacacaagaacctaggcaaatgccagatgccctgccaaggaacctcaaaaagcggacg

SEQ ID NO: 14871 - DNA, 138 bp, Glycine max
  Coding DNA Sequence Number=SeqID_5092
aagtcttagaagaaactgagttgaggctagtgagcagtataacgcattgtgcttcctgatctgaactgaataaaataaggttcaagtgcaaatcaatttagccatgtgttggtatgaaaccaccataacagattgtta

SEQ ID NO: 14872 - DNA, 585 bp, Glycine max
  misc_feature (28)..(28): n is a, c, g, or t
  misc_feature (63)..(63): n is a, c, g, or t
  misc_feature (145)..(145): n is a, c, g, or t
  misc_feature (147)..(147): n is a, c, g, or t
  misc_feature (168)..(168): n is a, c, g, or t
  misc_feature (190)..(190): n is a, c, g, or t
  misc_feature (292)..(292): n is a, c, g, or t
  misc_feature (295)..(295): n is a, c, g, or t
  misc_feature (301)..(301): n is a, c, g, or t
  misc_feature (313)..(313): n is a, c, g, or t
  misc_feature (322)..(322): n is a, c, g, or t
  misc_feature (324)..(325): n is a, c, g, or t
  misc_feature (328)..(328): n is a, c, g, or t
  misc_feature (375)..(375): n is a, c, g, or t
  misc_feature (377)..(377): n is a, c, g, or t
  misc_feature (395)..(395): n is a, c, g, or t
  misc_feature (424)..(424): n is a, c, g, or t
  misc_feature (432)..(432): n is a, c, g, or t
  misc_feature (458)..(458): n is a, c, g, or t
  misc_feature (464)..(464): n is a, c, g, or t
  misc_feature (473)..(473): n is a, c, g, or t
  misc_feature (487)..(487): n is a, c, g, or t
  misc_feature (500)..(500): n is a, c, g, or t
  misc_feature (521)..(521): n is a, c, g, or t
  misc_feature (535)..(535): n is a, c, g, or t
  misc_feature (544)..(544): n is a, c, g, or t
  Coding DNA Sequence Number=SeqID_5093
ttatatataatagcgcgctgtcgtcgtnaaaataataacagcgcacgcggctctcgcatgcgntaaacacgagagatcagtaggataatacgaatgcagcgcgagagtagcgcgaggtgctgccacgcgacagaataataatgantnatcaaacatagagaaacgcanccgtgctgaatacaaatgatcnctcactgctgcgtctcgactgctctctttactatgtcatctatatacacaaaatatacgtgcgcgtcggcgactttcgtgtgtcgtgcgtgatgaataggcnganaactanactcatcgcaantatgactancnncgntcgtgctgtcggcatgcatatacacgcacgacgtgtcgactagatantnggtacgagagctgcagantgattactatgcgactcgccgtcggcgcngcgctgtnctattagatatatcgtagtagtgaantgattngtagacgcngagcagctgagtancttcgctgtatgntgcataagcggatattgatanttagactatcacgngtagtggtntgtgatcatgctgctcgacgcgatatactatagacgcacaa

SEQ ID NO: 14873 - DNA, 490 bp, Glycine max
  misc_feature (84)..(84): n is a, c, g, or t
  misc_feature (101)..(101): n is a, c, g, or t
  misc_feature (130)..(130): n is a, c, g, or t
  Coding DNA Sequence Number=SeqID_5094
agtgcgcagcgtattcagtgtgagtgtgttcgcttctcgaggcggcgttcgcgcgccgtcctgcatcaatctgtgtgtgctatnttcttgtctagtttgtnatgacatgtgcatgctttattcctgtcgncgtgtccactgatgggcttcgcgtcgtccggacatagtatgacggtgcggtgttgagtcggcgtttaccgtatatgttatttattagtcgtcgctgttctctcatccactctagcatcacttattccgatagcagcggctgcggcggtcagacatacccgccgccgcgcagctaacgttactatcgacgcgctcacaactgtcgtccgccgtactcgagttagagcatccagcgcgctttgtgcgcgggcgtcgttcatcaggtgaataaatgccgcggctgcatcgcaatcatttctcgacttatcctcttgttgtcggggagcaatcatcgcggttccttttgtccttcgtgtgcgtg

SEQ ID NO: 14874 - DNA, 155 bp, Glycine max
  Coding DNA Sequence Number=SeqID_5095
ataagatgctcatggttaagggacctgtcatgatgcccactatagttcttcaaatcactaccatgaagtcctcttgtggtgaatgtgccatcacatgggacagatttgaacttcttgtgcacaatagggtgatagacctctacagtctcccagat

SEQ ID NO: 14875 - DNA, 314 bp, Glycine max
  Coding DNA Sequence Number=SeqID_5096
ttttccaccacatacaaccttctttctactttttctttctctttctacatctcttttcctcccaccctatatactgcaaaatgggaggaattatcacatgatctgggaccatcatgtatctatagttccgattaatctctaggtgacatttaatcaagttttattatctcttcttggtaaattgaaaaaactcgagtacctatcaggttaagactatggatacgtactaaagatgactaagaccatgagacatacttggccaacatgggtcctcaagagggttttcctcaacctattatcatcgtgctccgtca

SEQ ID NO: 14876 - DNA, 469 bp, Glycine max
  misc_feature (155)..(155): n is a, c, g, or t
  misc_feature (184)..(184): n is a, c, g, or t
  misc_feature (394)..(394): n is a, c, g, or t
  misc_feature (442)..(442): n is a, c, g, or t
  Coding DNA Sequence Number=SeqID_5097
aaatcaaacttctcactcaaactcttcatgatagagaaactcaagaaacaagagcgacaccttcaatctattctccacacactcattttactgaagaaggaccaggaactccatcattgggctccagagacacatatgaacataatcaagctttngataaactagctcatgattatcaatcttngtctgcaagatataaagaatcacaagaaatcatcaatagtttgagaaatgatagagacatgagagatcaagatgtttatatcatagatgaaaagtttgaaagaataatgaaagattctgaatccatcaaaaacgcaaaagaaagtatggagagagaaagaaattcactttacaaatatgcagaagaattaaattcaaaaataagaacttngactgaagaacatctgagccttcaaaaagcgtatgatgagatccaatngagaaacatgtctgatcaaactaaact

SEQ ID NO: 14877 - DNA, 317 bp, Glycine max
  Coding DNA Sequence Number=SeqID_5098
catggctatgaaattcttttgggacaatagcttgactttagcttgaggtagttccagtataccctgttctttcaccaccaaatcttactcctggacaatcaaatcgagtgtgcaatgctcttgctcttcttcagtgtgtatcatctaaccctggatacaaggaagctattcctcgatgctcatatacctttatttctttatccctgtctttatacaacaagcagtcaagaacaattgagtacttgaaggtaacccagcatgggggtattgatgcatttgccaaacgttatggatacaatggttcgagttgccttcgt

SEQ ID NO: 14878 - DNA, 580 bp, Glycine max
  misc_feature (482)..(482): n is a, c, g, or t
  misc_feature (485)..(485): n is a, c, g, or t
  Coding DNA Sequence Number=SeqID_5099
acttatatgtgttgagcgaccggcacgaaaataaaaatataaagggtgggtgtgcttggccctgcaatttgttttcagcgacaccctatgcacaatcttttaatgttttttgtagacataacaagcatgtgacgcgccatattattccaataataagatatgcgactgcggtcccctctgtacccgtttataattcgccagaggtgtgcggtgcggggtcgcgtgtataaatataaccccccgtgaaataaaaagttgcgctggttatataaatcatgtattatatacacgaaaggcctccgcgaccggaaataataaaattatatttatttataacatgcatggtacccttcttccttatgcgccagataataatatgtgcggtgtggtggggtgcgttgcgataatgacagaacaaatagcgcgcggctgtgtgtagcgaagccgctatatataatgcttgagatatttatttactcccngcntggtgcgttatattagtaaaatcatgaatattggtgtcgcggctctggtgcccgcgaataagtataattctatgctagtatacggcacacctata

SEQ ID NO: 14879 - DNA, 142 bp, Glycine max
  misc_feature (54)..(54): n is a, c, g, or t
  misc_feature (76)..(76): n is a, c, g, or t
  misc_feature (80)..(80): n is a, c, g, or t
  misc_feature (90)..(90): n is a, c, g, or t
  misc_feature (100)..(100): n is a, c, g, or t
  misc_feature (103)..(103): n is a, c, g, or t
  misc_feature (113)..(113): n is a, c, g, or t
  Coding DNA Sequence Number=SeqID_5100
gaatcagcataaaccaaggcagcatatgtagaaaccggcaatccattgttcatnggaaatgattctgacagtatcnatanacatgatttnaacaactgtnggnaccgtaacangccataatccatgatattccaagtgatag

SEQ ID NO: 14880 - DNA, 579 bp, Glycine max
  misc_feature (238)..(238): n is a, c, g, or t
  misc_feature (294)..(294): n is a, c, g, or t
  misc_feature (533)..(533): n is a, c, g, or t
  Coding DNA Sequence Number=SeqID_5101
gtggacatacacacctctgtatattgtgtgtcgtcgacacgctctggcctcccagctcatcgctgtggtgtggttgttcgtatctgcctgccccggcatcctacgcggaagaagcagcacgcacggtgccgcgttgagtatagtagcgacgagcgcacgcgccgccgactggagagctggcgaggaggcgcgccatcatggcggtgttacgaccgcgctgcgcccgcatatgcgagtntactgtgacgcatctatggtgtgtaggatgagagcgctgccgtcagagcttctgtngatgaatactatcaagagatgagagaacgatgagatgagtgatacgacgcatgaaatcatcgcgagtcagtcacctagatgctactctatagtagcataagctgcgtctcgcctctcgtgttgagctacgtcggcgcgatgcaccgtgcgcgtgaaatgtataggtgtgtatatctcttctgtcatcgtacgtcttcgcgatgttgtcctcgactgacgcattgtgtgagtccgcgcgngcactcacgcgccacacgctcgtcgttccacaactactcatatcat

SEQ ID NO: 14881 - DNA, 328 bp, Glycine max
  Coding DNA Sequence Number=SeqID_5102
aatccaattggcacctgcaacacatttgtcgttttgttactatctggaaacttcggttcggcatacatggggtgggtctaacaagctcctcccggaaactccaagaacggtgagaagatcttcaagaccaagggcgctcagggccacaccgtaggacaaaggtgcccgacacaaacaaagacccaatctgactggtttgcttggaaggcaatcttgcacaactcctggatatagctattctactgctaacaaaaacatggctgctatttgagaggaaaagaccttgtctgagttcttgctcaaccccacaaagtgtatttcagggaca

SEQ ID NO: 14882 - DNA, 255 bp, Glycine max
  Coding DNA Sequence Number=SeqID_5103
tcctctaagatagatgcagagtcttctgaatatgcagagatattagagtttgatgctatgtaagaaccaccatcaattttacatgtcgaagttttagattttgatggtccatttgacaaggatgtttcacttggacatgctgagatcaattttctaaaacacacatcaactgagttggcagatatgtgggtcatgcttgaaggaaagcttgcccaatcttctaagtcaaagttgcacttgagaattttcttggat

SEQ ID NO: 14883 - DNA, 512 bp, Glycine max
  misc_feature (84)..(84): n is a, c, g, or t
  misc_feature (94)..(94): n is a, c, g, or t
  misc_feature (97)..(97): n is a, c, g, or t
  misc_feature (166)..(166): n is a, c, g, or t
  misc_feature (169)..(169): n is a, c, g, or t
  misc_feature (175)..(175): n is a, c, g, or t
  misc_feature (201)..(201): n is a, c, g, or t
  misc_feature (236)..(236): n is a, c, g, or t
  misc_feature (244)..(244): n is a, c, g, or t
  misc_feature (255)..(255): n is a, c, g, or t
  misc_feature (270)..(270): n is a, c, g, or t
  misc_feature (288)..(288): n is a, c, g, or t
  misc_feature (296)..(296): n is a, c, g, or t
  misc_feature (314)..(314): n is a, c, g, or t
  misc_feature (354)..(354): n is a, c, g, or t
  misc_feature (387)..(387): n is a, c, g, or t
  misc_feature (415)..(415): n is a, c, g, or t
  misc_feature (474)..(474): n is a, c, g, or t
  Coding DNA Sequence Number=SeqID_5104
actcgaggagtactcggcgcgcggtagcggccggcaggcgggatgggctggtggcgcgcgcgcgggcgcggcgagatgttgcgngcgcacgagnacngagtcgcagggtcgcaggtgcggggagagttgagagagggagcgaggagggaggcgcgatgtaagcaangancatacnatcacatctcgtgcaccatcgccgcntcacgagagacacatcgctccagctggcgcgtttnctcgcacntcactcgcgcntgtgatgggtgcggncagctggatgcgccgcgncacgaggngcgagctgctagagcggngggcgacagaggtacaagaagagagagtgagcgagtgatnctgagcgagcagtctacgaaatagtgagattanagaactgatatatattatgccatctcantcgccctccctatccagcaccgccatcacaccgtatacaccctcccactcacacaccancgaggacgagctcgcgagaacgcgcacgggcgagcgtc

SEQ ID NO: 14884 - DNA, 503 bp, Glycine max
  Coding DNA Sequence Number=SeqID_5105
gtagggcctcgtgaaaccaccgcattggtatcaggcacaaccctgatgatgaccctgtaggattagcttcccatcgtgttcaaagaagattggtcccagtggctgtagggccatgattggtccagttgcaggtggaaggaaaactgagaagcctcctttccaggctggaaatgcttacccccagttcaaaatgaaaaggaaatgctggccccagggtcgtggtggtgctattaaccctgtttagcctccccccggaggaagtaatccccagcatattggtcacgcaaggactgtcaggcgtgaagctcctcctggacaaaaggttggtttcattgctgctaagagggctggttgttttaaaggaccaacttctgccactgcttccaaggcttataaggcgtaaagaaaacgttggtaggggtattaaaattgaatgccaggttttcaggtttggttttcctttttctgaaaagttggttggtaaactaattgggcaccttctt

SEQ ID NO: 14885 - DNA, 587 bp, Glycine max
  Coding DNA Sequence Number=SeqID_5106
taagtagactcgtaaattcgtaagagttaacgagttaactcgataatttgataaccatgtgtgtacatataatcaacattaccatatgatatatataagagggaggtaaggaaaaaaaaagagagagatggaggagtttactttccaatacatatgtaaagttaactagtttttttttattttcttatcaaagccctaatttgtacttctataaagagttaatgtcaaaacattcaagggaagaaaattaaatttatgaaaataaaacaaaccatgtatatccttcaaagtatttttctcctaattaaggattcttatagattcatttcattataaatttcagtcgtctcactttttactaaaatcccaacttcaagatatatagaggaaatcttgatacaagttataaacatgtgtaaatcctctcttttttacataatatatatcattttgccttaaaaaaaaaagaagaggaaatcttgctattaattaatgcctaatatggcctttaggcacttcccagaataaaataaataaattaatgcctaaaaatattcagtaaaatatactttgatttagatgtccaa

SEQ ID NO: 14886 - DNA, 472 bp, Glycine max
  misc_feature (30)..(30): n is a, c, g, or t
  Coding DNA Sequence Number=SeqID_5107
tccgcgcgctcatcaagcaggctgacccgnaggtggtcgaggccgtcaagtgggcgaaaccatcgaactcgatgtccggggtcccggtttgggagcacgcggggatcatttgcacgggtgagcactacaaggataaggtcaagctgaccttcgcgaagggggcttcggtaccggacccgaccgggctattcaattcgagcctcgacggaaacgttcggcgggcgatcgacttcttcaaaggagtcgacttcgacgaagctgcgttcgtgacgctgattcaggcggcggtgaaggtcaacacctcgccgaagaagtaagtcgatggaagcggggacgtgtcgcaactgcggagcggccgtttcgtcgcgcttctgcccggagtgtgggcagagcaccgagatctcgattccgacgctggccggactgtttcacgaagtgttttcggccgcatggtcgctcgattctcgcttgg

SEQ ID NO: 14887 - DNA, 533 bp, Glycine max
  misc_feature (99)..(99): n is a, c, g, or t
  misc_feature (287)..(287): n is a, c, g, or t
  misc_feature (317)..(317): n is a, c, g, or t
  misc_feature (355)..(355): n is a, c, g, or t
  misc_feature (416)..(416): n is a, c, g, or t
  misc_feature (472)..(472): n is a, c, g, or t
  misc_feature (496)..(496): n is a, c, g, or t
  Coding DNA Sequence Number=SeqID_5108
atatattaccgcctttccttgtggcacgcgatgcgttgtctgtgcgcggcgggtctcgcgttcgacaacgagttgtggagatagtcacagtattattgncccggcgtgtcgcgtgcgctacaacccgccatgtatattacccctttatatatttgttataattctcgcgcgtgctccgtttgtccactctcccgtcccttcatattataacaccaagacacgctgaagagactatacgcacccggataacaacagataacaaacatacagtagtgaggcgaatgcanagacgcggagaccgcgtgtgtctttttatnccccaaatgctgttcatcactacgccatacagttcttncaccaaatcacagttatactcagattttcttgctaccgacgtacggtgttcggagcgtagnacaggtgggcaccgatatcccccagtgtattattgggcggacgaagaagagatcanttattcgtcacccaagcaagtagnaagcggggcgaggacacagcggagagccacatacaga

SEQ ID NO: 14888 - DNA, 374 bp, Glycine max
  Coding DNA Sequence Number=SeqID_5109
tgtaatggtctttgtgtcactcttcttatttctttggatgcttctcttctctctcgggtttcgagctccctctctctctctgttctctgaagaccgaaccaaatgaccttcagaggaagaagattcacctttctgtcttcacattttgccatacccaaatgcccccttctctctatgcggtgagttccaattcacaatgcgtttgtttcttcttgcttgtgtgttgctgcagtcttctctgcttcagacacctcctcacatgccacttggcgataatgcatatcttgtcgcgttggttcttgactgcacagatgcagtccacggcggcggtagccgctggagactgagatttcggcttgggaggtcttagattc

SEQ ID NO: 14889 - DNA, 572 bp, Glycine max
  misc_feature (37)..(37): n is a, c, g, or t
  misc_feature (45)..(45): n is a, c, g, or t
  misc_feature (60)..(60): n is a, c, g, or t
  misc_feature (100)..(100): n is a, c, g, or t
  misc_feature (213)..(213): n is a, c, g, or t
  misc_feature (238)..(238): n is a, c, g, or t
  misc_feature (245)..(245): n is a, c, g, or t
  misc_feature (268)..(268): n is a, c, g, or t
  misc_feature (326)..(326): n is a, c, g, or t
  misc_feature (352)..(352): n is a, c, g, or t
  misc_feature (522)..(522): n is a, c, g, or t
  misc_feature (532)..(532): n is a, c, g, or t
  Coding DNA Sequence Number=SeqID_5110
acccgtcgcgatatcgatgatgctagtcgtgtgagangatacatnctgacgcacggcgcngtcagctaatcgatgacggcgcgcgcgatacgagagtagnatgcggactgaagtacttgcttatatcgatcgtagcatatgtgttgattgtgtattacgtgttctgtactcatacgcgacgctgagacgaatggttgataatatgacgtatgntgtgagtacgagagctgcgcgcgantatgggntatgctggagctaaccatggacncgcactctatgagacgtgtaactatattgtatatactgtatgtatacgtcatctgtgnatctctaatactcgtcgaagcagtantgagacgtcgtgctgtcgacctacagatacgttgataacgaatgcgattatgtcgctcagattgctgcatcgtgtctggtgcgtatatgtcgacggcagatcgtgtctctacatcaaaatgatagtggacgataataactaataatctacatatgacggtctgtctctgncgtgtcatcncaatgaatctcgcatacatcctcgtgatccgtcgtaactt

SEQ ID NO: 14890 - DNA, 546 bp, Glycine max
  misc_feature (36)..(36): n is a, c, g, or t
  misc_feature (265)..(265): n is a, c, g, or t
  misc_feature (400)..(400): n is a, c, g, or t
  misc_feature (434)..(434): n is a, c, g, or t
  misc_feature (496)..(496): n is a, c, g, or t
  Coding DNA Sequence Number=SeqID_5111
gactcgattacctagacaattggtctagctcggcgnctgtcaccgagacgagcgttgtgcgcgcagccataatgacattaccactaaccacacgaagagcaggaggaccattgaaggaggatggatgcacccaaaacatatattattccactcttcatataacataacaccacaccaacactatcatacccgccctccagacatgtgagaaagagacagatagaggtatgcacacagtaattgcaagagccatgcttaggcgggngccaaatcatgagtagtaggaagatgaggagaaggatgcatactacaagagaagcccggtcgcagacgcgctcgatagaatgatctggcacaagctctctcttactccgcaacagcgttaaacacgatcaacacnacaataacatccacttcgtatgcacacgctacgnggatatatgcgcaggtgtggcggggagagggggcgcgcccctttatgtgagagctgcgcganggagggggggggccgcggcgcgccgccacttcagtttcggcgagcgatta

SEQ ID NO: 14891 - DNA, 582 bp, Glycine max
  Coding DNA Sequence Number=SeqID_5112
caccgtcggccagttttagatctaaatcttaaatccattcgttgagcttttggttttggttggtgctgattaaggagtctttgaacatgcatggatctttgtatctggtgtttttggacctggttcttccccaccgtttgtttggtaagatatccggttcgtctcgaaggttttggggctttggctccttatcatcagttcgtcgaaggcgtcaggtttaccgacctcttccatgagtcttctttggagatgtcaagtgctcgtggcttcttaagtggtatgttgtggtgacgtttggagcataataaagagtgtagccttgaactccattaataagtttgttctttgttgactttatccttcttctcttttttgtcccttccagttttaacattgttcagttattgtattgttggatctgttctgagtttgtttcatcctagctctaacgttttttcttttggttccgggaacatgtctgttgttcgccggctaaagtctccagggatggctctttcatccgctggcttagtctccggaagctatgtggcttgccggcttctgtgtcccaatcatgtattc

SEQ ID NO: 14892 - DNA, 515 bp, Glycine max
  Coding DNA Sequence Number=SeqID_5113
gtaaagcgacgtcaccatagtttcaccgggtgaccccgttgcgcgggagcgggaaaacggggcctttctgcgcctgggacgggcttcttagctagctatcaaccccccacggtgatcccagtccgaccaagaaaatcgacaactgccctcgtagggcgtatacaaatacgtgtcacggtcgtgacattaccgtgaactttgcatgttcgctttggaccatttcggccatcaacgatggcagctcaacaccgtacggagagacatgcgccgcagccgcaaacacccgcacgctcacttctcgcccacccctcgccgcctccacctcgcgttggcctgcgctgcggcgtttctcaccgtggtctactcgtccacataccgggcgagcgccgacccttcgacgagcttctcgggcacgttggtcgatcgcgccgggcgagccccgctcgccggtgtggaggtcgcgctcgatgacggcgagttcaccaacaccgatgagcacggcaacttccacttcg

SEQ ID NO: 14893 - DNA, 240 bp, Glycine max
  Coding DNA Sequence Number=SeqID_5114
gaaattatcactgcttttatcagttgtgtgcatgtgaaaggtacgagcccaagaagtaaaagataggacatccaagtcacttccactatctaaaacaaagaaaaatctatgagttaacaggtgaaagcaatgcccaagaatacctgaagactaggagggcaatggatattgaagacatgagctccaaagatcacgcgtaatattgctctttccgtaatcacgaatccatatgtctcgtct

SEQ ID NO: 14894 - DNA, 556 bp, Glycine max
  misc_feature (83)..(83): n is a, c, g, or t
  misc_feature (172)..(172): n is a, c, g, or t
  misc_feature (435)..(435): n is a, c, g, or t
  misc_feature (437)..(437): n is a, c, g, or t
  Coding DNA Sequence Number=SeqID_5115
aaagcagagtctccccgtggtgttgagcgtccccgcgccgcacctccactcctcatatacctgatatatacagacgagacgcnagaactatcagacataaataggtgttaaattatcggtggttgtgttttgttaggcgccaggccgttggtggcatattgcgcagcagcgnggcgagcgggagattaattaacataactgcgcagcgcgcgtgattttagttattaatacaaggaaccggagatacaagggccagcatggacactaacaccctcccaaacagcagcgagctgcggggagtggttggtgtatgtatatcatataaactatttgcatacacatacaccgggtagtgcgagaaacaaccttcaagactagaggaattatatcttcgagagatgagtgcgcgaaggtgtattgtgatgtgcgggccancnccacctcgtcccggctgtgtggcggtggtgcgatttttcatattatggtggagagtgtagtaggaccggcccaggggctggcgtgtatctgcccctttgttccagagccgtatgtcaca

SEQ ID NO: 14895 - DNA, 550 bp, Glycine max
  misc_feature (454)..(454): n is a, c, g, or t
  misc_feature (521)..(521): n is a, c, g, or t
  Coding DNA Sequence Number=SeqID_5116
gaagatcgatatcacggcaccgccatgtagagtgtgacgcataacattcaccacatctcagtccacagcgcgcgtcgcacgacgacacaagaataatctctacgttcaacttcgtcggatcgcactacatatagagctcgtcatcgactacagcgacacgaacagcactcgtctcaatcggtcatactgttatatcagtcattatatcagcatcgcgcgctcgacgataacgcagatgtagataatcattttcaccgtggggtgcgcgcgctgtgttctatgccatagtcatcgtactttcgtcgtcactacgtcacggacatctcgcctagactctctaagaaacggacgacgagaagatagataacatagcacaccgacacagcgcgcagcgactatactataatacattactactcatcgcggacgtcaccctcgacacgccccgcagcgncgtctcgtgagcgcggttggttgtacgagtcaggcacacgcgtcctcgcactctactcgtatcttgngacctctcctgtatctctgttagggctat

SEQ ID NO: 14896 - DNA, 227 bp, Glycine max
  Coding DNA Sequence Number=SeqID_5117
gctatcttttgcacggacctccggtttatggtaagcctaccatgactgctgctattgctaatttcatgaactatgacgagtatgatctagagacaaccgcggagaaggacaacactgagctaacgaagccgctgattgagactccgagaaagtccatcacggcgactgacgacatcgattgctcactcgatcttaccggcccgagggccacgcaaaagacagaaaaa

SEQ ID NO: 14897 - DNA, 482 bp, Glycine max
  misc_feature (318)..(318): n is a, c, g, or t
  Coding DNA Sequence Number=SeqID_5118
gaagcgcgcgactcgagatgaagttctgctctcgtctatactcgggtaagacgagtcaagacacgccgcacccgaatgtcaccacgccgccgaacgagatgagaaaatgcatgctggcagggtggacacggcggtcacgaagaccagaatacgtcatctggtaaattacttcatatacaatcatctctggtgacaagaggatactgttctatgagaggaccaacaccccgcacgccaggtgacaggggagggttgctacgagctcagagatatggcatagatggagacgcgacgaagacatcacgttacaagtctccntctctcctctgtctaggcgattggataacaccccctctccctagtccctgctctataataaagagaggtgctctcacattacagttatactgtgcctacgaagaagatagcgcacccatcacgactattgtggatgggccgtcggtccccacatgacaaaatag

SEQ ID NO: 14898 - DNA, 568 bp, Glycine max
  misc_feature (473)..(473): n is a, c, g, or t
  Coding DNA Sequence Number=SeqID_5119
gtgtattgtcgagacacgacctttatcccaagtcagttaagcgcactgccacaacagctgcagaggcatgagagttaaatacactatcgcgtccgctgtcagcacccgctcttatatcgtgcgctacttctctttccaatcatatcatcttatttataactatactgttataattcctctatttgttttatattgatgttattatatattcttataattattcatgatatatggtagtatttaattatcgtatagagagtttagtgcaataaatttgatggagtgtgatattatatttaaatctaacttctctttctcctcatcatctatactccttcacctctcgtgggaaaacgtcatagtgagaagatgtagacttaaatctcgaagttaatttattaaagaggtttgtgacctcgtcgctctgctgtcgcctcgcatcgcggtttcccggcccctgcagtcccgcaccncgtcgccaccctcttatcacacctcatcccttcataccctcacatctcccgtgcaccgcgcacatcgccgtttatctcccactttacttgttcgt

SEQ ID NO: 14899 - DNA, 535 bp, Glycine max
  misc_feature (80)..(80): n is a, c, g, or t
  misc_feature (99)..(99): n is a, c, g, or t
  misc_feature (224)..(224): n is a, c, g, or t
  misc_feature (245)..(245): n is a, c, g, or t
  misc_feature (255)..(255): n is a, c, g, or t
  misc_feature (265)..(265): n is a, c, g, or t
  misc_feature (269)..(269): n is a, c, g, or t
  misc_feature (379)..(379): n is a, c, g, or t
  misc_feature (452)..(452): n is a, c, g, or t
  misc_feature (457)..(457): n is a, c, g, or t
  misc_feature (487)..(487): n is a, c, g, or t
  misc_feature (495)..(495): n is a, c, g, or t
  misc_feature (509)..(509): n is a, c, g, or t
  Coding DNA Sequence Number=SeqID_5120
cgtacagacaggagcgacgctgacaacatgatcatatgaaagttgagtatatagtctcatatgtaaacgtcgagaaattnataacgagtgctgctagantgcgtactgccatctacacgcatgctgcctgcccgaagctatcatctatacctcacggtctattactggatgtcatagcaactctgcacgatgcacaaaccagggacagcaacgacacgtcacgncgagcatcagagacagacagngggaagatcntgcgccaaantcancgtcgcaacgacaccactactctcaagtgtcatcgcagcgactcgacgacgcgtcgagtgcggcgcggcgttcgtctgctgcgcgcgcctgcggagttcgggtggtgcgnggtgagtagccggggatgttaggaagccgtgtgcggtagccgcggggtggaggcgcgatggcccggccgctgncctcntccatatcctgcgacgcgctctgtgttgangctggtanccggcaaactgacntcatatatcaaataccgcttcacgcg

SEQ ID NO: 14900 - DNA, 514 bp, Glycine max
  Coding DNA Sequence Number=SeqID_5121
tgctggtgctgatgccgcgctttgaggcggaagattttctgcagctgatcgagcgctacaaggtcgacaccatcttcatggtgccgaccatgttcatccgcctgatgaagctgccggaggaggtccgcaagaaatacgacgtctcttcgctgcgccacatcatccacgcggccgcgccctgtccggcggacgtcaagcgcgccatgatcgaatggtgggggccggtgatctacgaattctacggctcgaccgaatccagcgccgtcaccttcgcgacgtcggaggacgcactcaagaagcccggtacggtcggtaagatctcgcccggcgccgaattacgtttcatcggcgatgacggtcgcgtgcttggtgtcggcgaaatcggcgagatctattcgcgcatgcctgcaatggccgacttcacctatcacaacaagcccgagaagcgcgcagagatcgaccgcgacgggttcatcacctcgggcgacgtcggctatatcgacgaggacggcta

SEQ ID NO: 14901 - DNA, 497 bp, Glycine max
  Coding DNA Sequence Number=SeqID_5122
gtcttgcccttatttccaggataggatgggaaatgttcttggtaccaatggaccctcggctcgggtccaataatctgggcgcgaacacatggtgagaaattggggaaacgaacacatgaggagaggactcccttgacatggacaactgagcggctgatccagcaatggtcccccggaacacatgaggagaggactcccttgattcggaactcgtatgcgtcggcagcgatcggggaaggagattggtgatattttagtttaattaatctggaaacaggggcagtgagcctctgtttcttgctgctatactatcttggcgtatgggctactctttcaggttcatttcaccgcgtgcagattgttttaaaacatggggaggtgatctgatccctgtagatagatataaacctgcgtgctgcacgttcgtcgacagtttaggtgtttcatgtgcctggaatgaatgaatacacgggcttgcgtgctgtgtgcttgtcaac

SEQ ID NO: 14902 - DNA, 389 bp, Glycine max
  misc_feature (156)..(156): n is a, c, g, or t
  Coding DNA Sequence Number=SeqID_5123
agaatcctcagctgagctccgcgagagaagaaccagacatggcttccagctccaacaactccccatcattcaagatcatactcgggtcgtcgtccccggcgcgccgcgcgatcctgtcagacatgggatatgagttcgccaccatgagcgctgacntcgacgagagggccatcaggagggagaagccggaggagctggtcaaggccttggccgaagccaaggccgacgccattaaactgaatctggtcgacggctgtgctgatcgagacatcagagatccgcctacccttctgatcacttcggaccaggttgtggtgagtaaaggggtgataagggagaggccgaggagcatggaagaagccagggaattcatcaaggcgtactcgggt

SEQ ID NO: 14903 - DNA, 327 bp, Glycine max
  Coding DNA Sequence Number=SeqID_5124
tccttggcccacatctacgtctcggggttccatcaagagtcccttctccaagtttggtcccgattggcgttccacgttggttcggggcccccctggggtcccccgaagttcccgccccgggtcttcccgaaaaattaattctggaggtgggtccccaacctgggcccctttcccaatgtggaaagtttttacccccctgggcggggggaaagggccccccccccaacgggccggaagaaagatgttcccccccccctccttgggaaacaatttaagagggggggcgcgggggggtttttttttacaccccacatttgtgtgggaaag

SEQ ID NO: 14904 - DNA, 401 bp, Glycine max
  Coding DNA Sequence Number=SeqID_5125
tttcaacaatcgcaaaagtctccccgaacgaaaaatcaaatcttccgtgaacccaaaaatgtcacgtctcccgatcctaatcgccgccttcctcctcctcctcctcaccaccgcaaccgccgaatcagactccccgacggcgtactccctcctccagagctacaacttccccgtcggaatcctcccaaaaggagtcgtcgcttacgatctcgacacgtcaacaggcaagttccacgcctacttcaacggctcgtgcagcttctccctcgtgggctcgtaccagttgaactacaaatcgacgatcagcggctacatctccgagaacaagctcacgaagctgagcggcatcaaggtgaaagtcctcttcttgtggctcaacatcgtcgaggtcgttaggaagg

SEQ ID NO: 14905 - DNA, 428 bp, Glycine max
  misc_feature (38)..(38): n is a, c, g, or t
  misc_feature (117)..(117): n is a, c, g, or t
  misc_feature (144)..(144): n is a, c, g, or t
  misc_feature (163)..(163): n is a, c, g, or t
  Coding DNA Sequence Number=SeqID_5126
caggaagacaagacgggaagcatgacagggaccacagncaaccagaagcccaacaaggagaaaacagcaaccaagcctcggagaaagaaaccaataagggcagaggtagccgacgancccacagaagcagcgacaacaaccccncacaaaaaaaggaagaaanggggcagccacagaagttttttttcagcctcagcgtcacaaactccactgattaggagacgtcatcatcggacgataatgatcagaatagcactggcgggggagtaaaggacaatgactccatggagaagaggagaaagagggtgagaggaagaagttggaaggtgaaaataaaggaattcattgactcacagatgaggaagctggtggagaagcaagaggagtggttggaaaaactcacaaagacactggaacacaaggagaag

SEQ ID NO: 14906 - DNA, 590 bp, Glycine max
  misc_feature (44)..(44): n is a, c, g, or t
  misc_feature (51)..(51): n is a, c, g, or t
  misc_feature (153)..(153): n is a, c, g, or t
  misc_feature (185)..(185): n is a, c, g, or t
  misc_feature (194)..(194): n is a, c, g, or t
  misc_feature (235)..(235): n is a, c, g, or t
  misc_feature (241)..(241): n is a, c, g, or t
  misc_feature (253)..(253): n is a, c, g, or t
  misc_feature (262)..(262): n is a, c, g, or t
  misc_feature (281)..(281): n is a, c, g, or t
  misc_feature (319)..(319): n is a, c, g, or t
  misc_feature (344)..(344): n is a, c, g, or t
  misc_feature (352)..(352): n is a, c, g, or t
  misc_feature (377)..(377): n is a, c, g, or t
  misc_feature (394)..(394): n is a, c, g, or t
  misc_feature (413)..(413): n is a, c, g, or t
  misc_feature (478)..(478): n is a, c, g, or t
  misc_feature (533)..(533): n is a, c, g, or t
  misc_feature (565)..(565): n is a, c, g, or t
  Coding DNA Sequence Number=SeqID_5127
gaacaaaggaccacagacacacgaccctcactcacgcatcacancacacanccactatcaaccaacgacacgcgatcgtatgagcgagacagcactacgcgcacgctctgactgcatcccgaacagtcgagagcagacggagaggagcgatangatatgtacagacgagcgaagacacgagagtngcatcacgngcagaccgacacaacgatctcatcggcggagaacgaaatanataccnactggcacacantcaacacancagatcctactgtgtacangattgcgacatcggacgtacgatgcataatcgacatancagaacaactcatacgcacaacaancgacatcnaccatacacaccacactaacacagnactaaagacgacgcacnataggactgagtacgagangctgtaacgtaaccatcgacgtgatctagagcatgacacaacacgcgagacgcacagcatgctcnaccagcgtcccaacaagagcgatactcgcacgatcctgcgcgacagcctaacgancgcgcgccacacatacacacgcgctcgacacncgcacgcaagactctgagagacaca

SEQ ID NO: 14907 - DNA, 292 bp, Glycine max
  Coding DNA Sequence Number=SeqID_5128
tggcttcctccgtggcgctggttttcgcggtgggccttctcggcgtctaacttaccatgcccgattcccattaccggtttcttaaacttcctctgaccctttcagaaccttccttcttccggatatcctttaaaacttatcaatggactcacctggcaaatcttgggggggtctgcggggggtatattttcatgcccactctcatgatttcccgggcggggttcagtgatagtctgttggagcctcttttgaagactttaaagggtggctcttgttggttcaccagccacag

SEQ ID NO: 14908 - DNA, 193 bp, Glycine max
  misc_feature (161)..(165): n is a, c, g, or t
  Coding DNA Sequence Number=SeqID_5129
acttcagtgacacgttcaatgaaaactccccacctaccaatgatccagaatatatatcaaatcttggagctgcagtatataaagggatttccaaaggtgacaaggatgctgtctggttaatgcaagtatgtttcagttgacttgggatcttctggtttccnnnnngattccttccattatcttcaggagtacc

SEQ ID NO: 14909 - DNA, 158 bp, Glycine max
  Coding DNA Sequence Number=SeqID_5130
ggatgcccgctttgtccaaatattacaatggaacttcttgggggtgatgaatggcccctgggacaaacttccttttggatgaacccctgatgatggaaaaccctaacaaagggtaccaaatttttttagggcgggacctgaaatagcccgggttcttg

SEQ ID NO: 14910 - DNA, 576 bp, Glycine max
  misc_feature (280)..(280): n is a, c, g, or t
  misc_feature (324)..(324): n is a, c, g, or t
  misc_feature (467)..(467): n is a, c, g, or t
  misc_feature (524)..(524): n is a, c, g, or t
  Coding DNA Sequence Number=SeqID_5131
tgtgcgcatgatctcattggtgtctgtgatcactctccaaattgcaagacttggtacacaatccttacccactcacatgtcataagaaccctctgttctcctcacctccttctggcactgaccgtaacattagccgtgagtacatatcagacgttaaccacgatttgcgaatgagcagcgacgcggaagagctctacgacctacccacacatacgcacatcatatatgttacgctacgaatcagcatgactcgctaactgctgccagtgtcctgttcttntgtgaattatcgctatacttctatatctatccatcactagtagntcgatcccagctctctgtcatcggctcaatgttgtccggagcggatgtactatccgtacgtgtgaactgctgcgttctatcacgctacgtatgtagcgatatattgcacacacataatagtgactgatgtgcagctacctacntgtataatgaagcagtatcacagcgacgagatccacgatatgcattcgcgttctctngacatgcgatcgtgcgagtgctgccgagacagcggtctgtatctatcaggta

SEQ ID NO: 14911 - DNA, 530 bp, Glycine max
  misc_feature (144)..(144): n is a, c, g, or t
  misc_feature (327)..(327): n is a, c, g, or t
  misc_feature (329)..(331): n is a, c, g, or t
  misc_feature (333)..(334): n is a, c, g, or t
  misc_feature (340)..(340): n is a, c, g, or t
  misc_feature (342)..(342): n is a, c, g, or t
  misc_feature (345)..(345): n is a, c, g, or t
  misc_feature (347)..(347): n is a, c, g, or t
  misc_feature (349)..(349): n is a, c, g, or t
  misc_feature (352)..(352): n is a, c, g, or t
  misc_feature (358)..(361): n is a, c, g, or t
  misc_feature (363)..(363): n is a, c, g, or t
  misc_feature (365)..(366): n is a, c, g, or t
  misc_feature (382)..(383): n is a, c, g, or t
  misc_feature (386)..(386): n is a, c, g, or t
  misc_feature (394)..(394): n is a, c, g, or t
  misc_feature (401)..(401): n is a, c, g, or t
  misc_feature (404)..(407): n is a, c, g, or t
  misc_feature (413)..(413): n is a, c, g, or t
  misc_feature (430)..(431): n is a, c, g, or t
  misc_feature (452)..(452): n is a, c, g, or t
  misc_feature (454)..(454): n is a, c, g, or t
  misc_feature (483)..(483): n is a, c, g, or t
  misc_feature (496)..(497): n is a, c, g, or t
  Coding DNA Sequence Number=SeqID_5132
cataatacttctagagtgatgtggagaggtttgtgggttggagatgtgttggaggatcgtatgtttgtattcaggtgcagtgaacggacaatcacaccaggataagatatcgataagaccgcgacagaactacaataacggcanatgagaatcagataggatagtaataatagacgtagaggagaggaatgtgtaaggctgtaaagaaagttgagagccgaccacgcatcatgagcagcatcatgctcgttcagactgcggccgaggcactatgatacacgcgataagagaaatcgcaagatagacgagagagaacgaagaatgcanannnanngaaagngngangnanaanagagannnngngnngcgctaacaaggacannganaagagganaatgagngannnnaacaanagaaaccagacataganncgcggtggggcgcggcgcgcncngcgccgggatgcggctcgcgtggcgcgancggcggcggaggnngggggggggacacacccaccagcgagaagaaga

SEQ ID NO: 14912 - DNA, 410 bp, Glycine max
  Coding DNA Sequence Number=SeqID_5133
cgctctaccgttttctttgccttgttatttggctttctccacactttccgcaagactgttctgttcttgaaacatccgttgttccaagatgagtgaagaagtgaaagagaatcaatctgacaagcttcagagaacagctccacgtttgaacgagaggatactctcatctttatcaaggaaatcggttgctgctcatccatggcatgatcttgaaatcggacctggagctccgtcgatcttcaatgtggttattgagatctcaaaaggtagcaaggtcaaatatgaacttgacaaaaagacaggactcatcaaggttgatcggattctatattcatcggtcgtgtatcctcataactacggttttatcccccgcacattatgtgaagacaatgaccctttagatgtgttag

SEQ ID NO: 14913 - DNA, 84 bp, Glycine max
  Coding DNA Sequence Number=SeqID_5134
gtaaatattgctgacgcagtggctaccttcagaacccagcgtcttagaatggtccagactcaggctcagtacaatttctgctat

SEQ ID NO: 14914 - DNA, 506 bp, Glycine max
  Coding DNA Sequence Number=SeqID_5135
atacctaagctaatagtgccatgatggctctatcgtcacaagcaaataaaaaatacacaaaagttttgtcacagtttactatgcgtagtagacgaatgaaatgaaacgtaattcattttcgattccattttactatcagttgggaaacagaacgtcaaccgatggcctcacatcgatagtttcgaacgtgattccaatacgtttacatttacattggaaaccggaaagcaacaattgacacttgaatcatacatatcgtttctttcatcgcgtcaattaaatgagataagtgagtccattttaccagtaaataatcgattgttaagccgattcattcatctactgatatcacatgtggtttatttgcttattatgggacgtgcactgcaaggggtaactcactccgcacatggttagaaagcatggttttagacgacatatcgtcaaaaatttaggcatccgaccacattgagtgtccccttaaaatgcgcatgatcgagctacac

SEQ ID NO: 14915 - DNA, 506 bp, Glycine max
  Coding DNA Sequence Number=SeqID_5136
ttacctatttcagtcggtcgattctactgagcttacagttctttattccattgcagatgcagcattgatcacatcgatcagggatggaatgaatttagtttgccaagaatatgccgcatgcaaaaatccacttaattcggagcagtcaggcgttttaatcttgagcgagttctgtggcgccgctcaaagtttgagtggagccgtgatggttaatccgtggaacactgccgatctcgctgatgccatcaatatggcgttgaccctaactcctcaagaacggcaggatcgtttacggggtgtaatcaagcacatccatacgcataccgccgcacattggggtaaagcgtttttgaaggaatttcaaagggccgtatcgaattcggaaaaaatcacccgtgtcctacctatcccttgccctgaagtagcccaagcgttcatgagaagtaaacgacgattattaatgtttgcatacgatggtacattagtgccatattcatccattcctt

SEQ ID NO: 14916 - DNA, 555 bp, Glycine max
  misc_feature (91)..(91): n is a, c, g, or t
  misc_feature (406)..(406): n is a, c, g, or t
  Coding DNA Sequence Number=SeqID_5137
gtacgaagtacgctagggcaactagatcagtatgaacggtagtatcttcttcgcgttccacagcatcccatcactgcttcgtacttctacntttctataagtaatacagagcaattagtagacgtcacgaacagacatgatctatatgcaatagctgctgacgtcttacacctacgatctgctcttcgtatgtattcgtcacacatagtagcatgacacgctcgtaaatacgaagccagctgtcatagccactccgcactcgagagactcgaagttactctaccaatgccgttatcactagagggtgacggtaacacggagatacgtattatcataatagttagtgaagtagtaaaataacaaacacataccacacacacctagactactcatatcacattgtttncgttacagatactatatattatccacatcacgtcctctcgcattgctctctcgtggaggcgaatgccccatctcacacgagaatctaatttctgtcgtcgcggggagtggtaatacatactttatatagtctataagtcccacagcctc

SEQ ID NO: 14917 - DNA, 460 bp, Glycine max
  Coding DNA Sequence Number=SeqID_5138
gaagaggaaagcatcgcgacccgccgctaatatctcaaatttacgcgccagtgtcgagaagaagaaaggtttcgcggagctgcgcgacgatctattccgcgaagcagcgaaactcgtcgcggaagatccctcccagagaatcgcgatcctcatcaaacctcccgcctccgaatcgagcgtcgctatgcaatcgttcgggtatccgtctgcggaaggagtggttcgacagttcctcaaggattctgctcctcatgttcctttaccagaggacgacgctgagaaggacgaaggagaggacgaggattggtctaagtattactggtgggaagatgacaagctgcttaattcgaaggatccggtggagattatggcggcgatggaggagatgaagaaacttcaaaagcaactcgagcattttgttccacgtgaaacaggtcaaggctctgggactcaggacgat

SEQ ID NO: 14918 - DNA, 561 bp, Glycine max
  misc_feature (320)..(320): n is a, c, g, or t
  misc_feature (453)..(453): n is a, c, g, or t
  misc_feature (533)..(533): n is a, c, g, or t
  Coding DNA Sequence Number=SeqID_5139
tatatagctttatgtctctctccgcattcaagcctatatagtgttttaatgccgagctgcgctatacttttcacacctcagttgttaatgccctcatcgcgtcctatcctcacacaactactctgcactatatccgcaccatagtagtagacctcgtcttagatattctagctcacatcaatctttactttcctccaccgcacacagacacgtcttctgatgtaatatgggagagtatattggtatggtatagttcgtacaacaattgtcccacccacgaccgactgacgcacgcatagtgtgtgacgtgccacccgttnttactcgcaaacatcaccctgatccatcgtgaatcactacagctattactcatgctatatgcatagatttcacctccttcttctcatgcacactccacgcactctggattctggctgcattctatgtagtttngatacagctccacagtgatacccacagcttgtgctattaggtctacatcttactcacttactcatgcgtactgtcttatntatgatgttaatatcacgactgcactac

SEQ ID NO: 14919 - DNA, 533 bp, Glycine max
  misc_feature (356)..(356): n is a, c, g, or t
  misc_feature (385)..(385): n is a, c, g, or t
  misc_feature (471)..(471): n is a, c, g, or t
  Coding DNA Sequence Number=SeqID_5140
ggtgcctgcactattaactccaatcccactcttcatctactccaacctctttcattacatctctatctaatttgcttagtatgttgttagaaatgactatattgtgttatatagagttagacacataacgaaccaccacaccaggagctcattcctaatatccaactctacatcgtctgaaataaactaaactagcaatagctgttgcttccgctagtgtctgtctcacatccacctcatctcatcctagcgaaatcatcaacttccagcaccatagaatttacttgttgttagtagtacagacaaagcaacaacagctacaaccctcccccactcgaccaatttatcaacaacanacactcaatagtggggtgcgatagaaacnaaagaaaccaggccttactcgccagacacaacatacacgagggggggggggtgggcccttacgctattcctgcctcctgatcgcanggccgtccctctctcctccttcttcggtgcgtcttaataataagtgtgtggcagcacacccc

SEQ ID NO: 14920 - DNA, 581 bp, Glycine max
  Coding DNA Sequence Number=SeqID_5141
aagatgtatctttatggtgtttagattctaatattatacattatctatatttgtatattgttgatatataaattaaattataattaaataataaaatttctgaagccgttcactatcatgttatttggttgttggtatatgtataccaatacaacttcactacttccgaaaaaaataacaatattagtctatgttgtatgtcattatctattactatttctcttgttatgtatactttcatagtggtgtttaattatgatgagtatataagatattagttatctggtagaaagtttgtatgagtatttagtatacatgtgcagagagagagtacagtacaatttattttaaatttacaagataaatagataatgacaacatacacacaaatattttggttaaatatttaatacattgtcatattattagtacgattgataggatcaacgaaattttataatatttattctcattatctattttatattatataaaacttatcataatattgaatatcaaaatatacagatactctattatgttgacttatcataaagagaagcacaattcaaaaacgtaga

SEQ ID NO: 14921 - DNA, 426 bp, Glycine max
  misc_feature (196)..(196): n is a, c, g, or t
  Coding DNA Sequence Number=SeqID_5142
ttgtttctgccaaacacttctcttcctctctccaatggcttcctccttatccttcgtctcatcctctcacctcactctccgcactccttccctcaccctacgcaaactctctccccctagaacctccgtttcgttctccgtcaaggcccagtccgtcgcactctcccaagacgatctcaagaaactcgcggcgganaaagccgtggaggcgatcaaaccggggatggtcctcggcctcggaaccggatccaccgccgccttcgccgtcgaccaaatcggaaaactcctctcctccggcgagctccacgacatcgtcggcatcccgacctcaaaacgcaccgaggagcaggccagatccctagggatccccctcgtggccctggacacgcatcctcggatcgacctggccatcgacggagcggacga

SEQ ID NO: 14922 - DNA, 402 bp, Glycine max
  Coding DNA Sequence Number=SeqID_5143
cgatttctctcgaaataaacagccamaacaaaaaattaattcatcatgaaattcgtcgtgctcgcagttttattcggcttcattgctgttgctgttgtcagtgcattaccacaagaaggtagtccagttggaactgttcaaaacgcaacacaagatgcttcggacaagagtgctataacaagtgcattgggagagatcttaaaacttgtagagaatgttttggaacaattaggcgtccgtgctggtactgacacaataactgatggacttcctatgggtgacatgggtagtggtaatgatggtgctgcttaaaatcaagataacctcagaaaaatcaaaggaccacggaaaatcattctcagaatcaaactaaaaaaattcaaaaacctgcaggtcaatttt

SEQ ID NO: 14923 - DNA, 403 bp, Glycine max
  Coding DNA Sequence Number=SeqID_5144
aaaaatattagctttccgcctccatcgagatctccaccaactaaaatgaaggttgtcgccgcctacttgctcgccgctttgagcggaaaagcttccccagccagtgccgatatcaaacaaatactcggatctgttggttgtgaatctgaagactctcagattgagcttttgttgaaggaagtcagtggtaaagacttgtgtgacctgattgctactggaagggagaagttggcttccgttccaagcggtggtggtggtgttgccatggcctctgctccttctgccggcggtggtggtggtggttctcctgcggctgaggccaagaaggaagataagaaagaagagaaggaagaatccgatgatgacatgggtttcagtctatacgagtaaggcagtaatgctt

SEQ ID NO: 14924 - DNA, 215 bp, Glycine max
  Coding DNA Sequence Number=SeqID_5145
tttccaacagttgcgaaccctgattggaaagggaacccccttgtagggcaattaaccgcggggggtgtgtgtgtacccccaggtaccgttcattggccaggcccataggcccgtcctttggttttttcccttctttttgggcagtcggcggtttttccggaagctttaaatcggggctccctttaggttcggattatgcttacggccttacccaa

SEQ ID NO: 14925 - DNA, 422 bp, Glycine max
  Coding DNA Sequence Number=SeqID_5146
cattcactcactatccattgcagaataaaaagaaaacctcagaactttaacgttcgtctagagagagagagaaaagaaaagggaaaaatggaagggaaggaagaggatgtgagagtgggagtgaacaagttcccagagaggcagcctatcgggacatcggctcagactgacaaggactacaaggagccaccaccagcgccgctgttcgagccaggggagctgagctcgtggtctttctggagagcagggatcgcagagttcatagctaccttcctgttcctttacatcacagtattgacggtgatgggagtgaagagagcaccaaacatgtgtgcatctgtcggaatccaaggcatagcttgggcttttggtggcatgatctttgccctcgtctactgtactgccggaatctccggtggaca

SEQ ID NO: 14926 - DNA, 457 bp, Glycine max
  Coding DNA Sequence Number=SeqID_5147
gattttggattctctgagctcggtattggcagagacaatcgtgaagctgttggtgagtacgttaccagtgtcttcgaaggtattaaacacggaaatgcctbtgaagcttggcttaacgaccttgacgatatttacaatgcttcattctacgttcttagaaacttcgactttgctgctgatgatccagtttacagacaaatgaatcttgatatgatgcaacaattggatgagattgccaacaacagagaagcaattggacaattcccagtcttcaagggtaatgccgcaacttgggctattctcgatgattctttctcagctgaaaatatcaagaaggtacaagctagcgtaagaaactttacaggatatgctgatcttactcccgttgtttatggagaaggagaaatcccaccagcaaagggaggtccaggagttgccgttccccatattagtaaag

SEQ ID NO: 14927 - DNA, 585 bp, Glycine max
  misc_feature (282)..(282): n is a, c, g, or t
  misc_feature (508)..(508): n is a, c, g, or t
  misc_feature (543)..(543): n is a, c, g, or t
  Coding DNA Sequence Number=SeqID_5148
gtgaaatctctcgttcgtctgcgggcgtgccctgttgcgtccgacacctgctcgccgggcgtggttgcgaaggcggtgtgtggtcgaacggatacccttctaacaaatctcgttccctaacgggcgttgtagtgtgcacaacgcgacttttgaggtggtgattttcaacgcctatcgtcgcaggtgctctccgacgtcctccgccgcgcacacgcctcggtagaatcgagtgaacgcatgcactgctcgtgcgttttccctccctcacaccatgcacctacncgacattcactaactcccggcgtacgcgcctccgcctctgcctcctccttcgctcgcgtttcatcggcgtgtccatgatcgcgtataaaggctctatcacttgtctgtcctgactctcttataccgcacacatatgatatctatcgacgtctcggtgtaatcacccacgtttgccaccaaacccaggacgttgtgtcgctcatgcactcgtcctgtgtggcctctngcgtgcgcactggtcacccactctggtgaggtctnaccacctccccgtcgcgttgtcttgtcctccacatcgcatat

SEQ ID NO: 14928 - DNA, 454 bp, Glycine max
  Coding DNA Sequence Number=SeqID_5149
atctagggttggtatccagatctgggattgtgttttcatcgggtgtttagggcttgaagctattgcggggatgaagcagttccacgtcgcaatatatgagattgtggatgatccttcactggattcaacaatctcatggagcaaaaacaacaagagttttgtcatctggaatcctaatgagctattcaccaaaaagattcttaagagattcttttgctgcaatctgtcacagtttctcaccgaacttgacacatacggatttgtaagaattaagggatctgagcacttggaattcggacataagcagtactttgtgagaggtaaacctgagcttttgaagaagatgcgtctcgaagctgcgatgaataggatgaagaaaagtgcccagagagccaaagctagagccgaagcagagaagaacggctctgtgactgtgagacgtgaacctcggatt

SEQ ID NO: 14929 - DNA, 408 bp, Glycine max
  Coding DNA Sequence Number=SeqID_5150
ggtatagtcttatcatacgagcggtgaagagccaagcggaataggggtgcgattatttcctgcttgtgtaacccggtggtgcctcgggagggaagtaaaagcttccttgctcaaccgggccacgaaagaaaacacgtgtacggttgtgctggtttaaataaacttgacggatggcggggcccggtgaaccaaatgttttttgtggacagaccagacgggtttcatgtccatgggtcgaggggtttccgggggcagagtggtcgcatgcatcaacgtggccgaggtgagggagatggcgggcgccgaacacatggccatgctctccgcgccggaggaacttacgggcctcctaggggacatcggcagcatctacacttgatcgatttagggagcctacctgtactgttc

SEQ ID NO: 14930 - DNA, 448 bp, Glycine max
  misc_feature (156)..(156): n is a, c, g, or t
  misc_feature (220)..(220): n is a, c, g, or t
  misc_feature (324)..(324): n is a, c, g, or t
  Coding DNA Sequence Number=SeqID_5151
gaatgactatagagcgtatggcgagtatgtcactatgtgacgtgtggaagacgcgctgtggtagtaatagaaagaagagcgcgacaaaagagagaacaatagtgaggagcgtgaagagtagaatatgccccagatgtgtgcgtagtgtggtcacgncgagtgcggacataagagtacaggtagtcacatagtagcatacgcatcattagacacacacgtnagagtgtgcgaggtaggtcgcctagatcaccacctaacagagatagtatttatcgtgagaactacgttctataaagatgataaacataagaagatagtatgcancgtaattgtgcaccagacacgtatatcaccacatatggtcatgacggtgtatgacgagtggttcgttatatgtattacgtggtggtggggctgctctggtagcgtgagtgagattgctctgagc

SEQ ID NO: 14931 - DNA, 578 bp, Glycine max
  misc_feature (76)..(76): n is a, c, g, or t
  misc_feature (87)..(87): n is a, c, g, or t
  misc_feature (169)..(169): n is a, c, g, or t
  misc_feature (173)..(173): n is a, c, g, or t
  misc_feature (208)..(208): n is a, c, g, or t
  misc_feature (251)..(251): n is a, c, g, or t
  misc_feature (253)..(253): n is a, c, g, or t
  misc_feature (315)..(315): n is a, c, g, or t
  misc_feature (429)..(429): n is a, c, g, or t
  misc_feature (465)..(465): n is a, c, g, or t
  misc_feature (547)..(547): n is a, c, g, or t
  misc_feature (551)..(551): n is a, c, g, or t
  Coding DNA Sequence Number=SeqID_5152
gagcaggatatcacatgtgcacacgcacaatatggctgtagagaaacgcacgcgagcatacgactacacacatgcnacgaagacagncgtgccacgcagctagcgcgcactagcagcatcgtgtcggcgaccacaccgacaccgtgcgacggatgcgagagtcagtacngcgntgatgcggaggtcgactgtaccagataggtctcgngcgcgatagtacatgagtgctactgtcccactcgacccgacgngngcaggacgccgatgagcgagcatacatatagatggtgtacacaatgccatcgtcactcattncaacgatgaaaatacataccacgcgctctcgtctatcagagactcaactgcgtcgtgtaacactatatatgtgtactgattacactgatcttgtatggtgttgcgtcgtcatancactagttacttatgtgctcttaatcacacaaccanccactgcgctgacgtgtaagacgcgatcgctagtcatcattctagtctcaccgatataacaagcgtgcgacgtcagatgacnaacntcgacggacacgtcgagctacaacgca

SEQ ID NO: 14932 - DNA, 542 bp, Glycine max
  misc_feature (140)..(140): n is a, c, g, or t
  misc_feature (202)..(202): n is a, c, g, or t
  misc_feature (367)..(367): n is a, c, g, or t
  Coding DNA Sequence Number=SeqID_5153
attcctaataacatcctactctcatcgcaaccatatcggtagaggcgatgggtatgtctaatactctgtcttatgttgatcatcatgatcagtagcgtgatatgcggttgcgacgaggcgcgagagtctgcggcagtggntagagaagagaggagagagagagtgtacatatcattatatatctatgatgtgtatactggtntgtcatgtgagctcgtaagagtgatgtgtttagtcagtatacgacgctatatatgtgagtgtatggatgagcggcgacttcagctctcgacgtaatatactatattactatatcgcgcgcatactactgcgaggaccatacagacgttgagatgacatcgcagtnacttcacgtagtactctatgtctcgctataattaatcatctacacctcccttcactcttagactacctgcgactcatatgcggcatgtcgcgtgtatatgtgtcggtactgtacggcgcatgccgtgcgtgctgagtggcgcgagcagatgccgatgtatgttgtgagcacgcta

SEQ ID NO: 14933 - DNA, 530 bp, Glycine max
  misc_feature (76)..(76): n is a, c, g, or t
  misc_feature (191)..(191): n is a, c, g, or t
  misc_feature (255)..(255): n is a, c, g, or t
  misc_feature (326)..(326): n is a, c, g, or t
  misc_feature (376)..(376): n is a, c, g, or t
  misc_feature (451)..(452): n is a, c, g, or t
  misc_feature (458)..(458): n is a, c, g, or t
  misc_feature (471)..(473): n is a, c, g, or t
  misc_feature (476)..(476): n is a, c, g, or t
  misc_feature (478)..(479): n is a, c, g, or t
  misc_feature (481)..(487): n is a, c, g, or t
  Coding DNA Sequence Number=SeqID_5154
atgagagtcgacacgtacaccacactccgcgtgtgtagccagcagaattacacaacaatggccatgatgtcactantcaaactacgacaccgtcaacctagagagtcgcgtctgcgcgcatacatgagagagtggctgctcgaacatgaccatacacagatcatgcacgctgcgtagtcactactcctacngttgttgacgcactaccgtcagtgtgtgtatgtagatctctcattctctgccgcgtctactatnctcactgttgtgcgctcctctctcgatacagctaagtgtagtttttgtatcgatatctatgtatagacagntataagtagactcttaggacaagtattaacttatcgactttctcttctcntcactactgtatatatacagtactgcatcttcgcttctgacacactgtgttgatggttgaggtacggtgtttctnngggtcngggcgcgcgccgnnngtntnntnnnnnnnttttggttgcacaactgatacgacttacattgacgcgagcgat

SEQ ID NO: 14934 - DNA, 338 bp, Glycine max
  Coding DNA Sequence Number=SeqID_5155
gtgaatggaacatggagccccagtaagagctttatgctcgcatggtaggtctccactgccggcagtggtaatctttcgaaggccctcaggtcctctgtctcaatgccaagtctcatcctcatggcgccgttgcgggtgcgctattctgtggggtgccgaatccctcatgatgtggagttagcagcagcagtggcagagctatgtatttgagttagagccaggcgacccaggattgtatgtatttcttgccctcatataagtagtgttagtatagtggcgagaagtaaagaagttgcggcacagcgtttggtgtgcagggcctaaagcacagtatcagg

SEQ ID NO: 14935 - DNA, 556 bp, Glycine max
  misc_feature (76)..(76): n is a, c, g, or t
  Coding DNA Sequence Number=SeqID_5156
cgcgcatagcgttacacactgatacaaggaatacagctagcggtccggtgttaactggataccccagcgtcgcacnatcaacaatgtgtagttcttcccgcgtattcgcttccacctccgcgcgttcctccgtacataccgatttagatcatttctgtgtgcggggttttgtcgtcaggagaagtgcgcttattcgttagacgtgtagtttgaatgcataattattacttctgagattgatgagcacaagtgtcacattacatgtcgtaagtggttcaacgtgtctcactttattatttcattataaaaggtcgcgttggctttggactgttctgtatggcaactcaccattctcagactagtaggtacgttgtgtttgttactcatctctgtaatgcttacgcacgagggcaacaagactcgtgggcaaggatcaatttactctcataatacaccgtatgcgttgtgagagcctgattatttgcccgggtacgcagatcgaatacataccctcgccccccaccctccccataaatgtttcttcaatgcccctgtt

SEQ ID NO: 14936 - DNA, 564 bp, Glycine max
  misc_feature (27)..(27): n is a, c, g, or t
  misc_feature (60)..(60): n is a, c, g, or t
  misc_feature (108)..(108): n is a, c, g, or t
  misc_feature (208)..(208): n is a, c, g, or t
  misc_feature (256)..(256): n is a, c, g, or t
  misc_feature (269)..(269): n is a, c, g, or t
  misc_feature (280)..(280): n is a, c, g, or t
  misc_feature (311)..(311): n is a, c, g, or t
  misc_feature (336)..(336): n is a, c, g, or t
  misc_feature (439)..(439): n is a, c, g, or t
  misc_feature (485)..(485): n is a, c, g, or t
  misc_feature (519)..(520): n is a, c, g, or t
  Coding DNA Sequence Number=SeqID_5157
aacgagctcagcgtactaattacagtnttcgacatatgttagaatcaatctcactctgtnattcagtgcgccagtcgcgttcagtgagtgtacagcgacatcattcgntcgcatccctcgtcgcgtgtgggcagctgtgtatagtgttctcacgatggtgaagtaatgatatatacataaacagcgagacgtcgctatgcataggtgntagatagtttgtgttgtcgggggtgctcatagagaaaatatattactntcgcgtgtggcgncacgctcgctncatcacgtaaacagacagcgtgtatatatgnaatgcgattacttcctcactgattnagctggactctcgtactcaggatgaacacacattatatcgactcagtcgcagcgtccctcctctcagcacctacgtctcagtgcagagaacacacacgcgcgncggctgcccttcccgccacagcgcggtcgtcgtcatagagtcgtcnggcctccagtgtaggagccattaatcactgtacnnacatatctcatttatccctacctctcctgttactcgatctataa

SEQ ID NO: 14937 - DNA, 386 bp, Glycine max
  Coding DNA Sequence Number=SeqID_5158
agatcttgcgtagaggtactgagcctaagcaacttgctttctccgcagcactcggcattaccttgggaatatttccaatttgcggtgttcctgtgtttctatgtggagtagctattgcatttcttggatctgcttgtcatgctccaaccgtcatgttggctaacatcattgccactccagtagaactagctctggtggtgcctttcctacgacttggtgaaaaagtcaccggtggtcctcattttcctttgacatcagatgcccttaagaaggttttcactggccaagcctcccaggaagtctttttaagcattggtaatgcgttactagggtggcttgtagcaactccatttttctttattgcgctatacgttgtgttgatgcca

SEQ ID NO: 14938 - DNA, 502 bp, Glycine max
  Coding DNA Sequence Number=SeqID_5159
gggagtactttctgttagatctcataggagtcataacatatattaccaaatggaatttatcaatcagttcatttgtttctatgtatataatcatgcaaagtattgtcaataaagctattagcaaaatatggaaatattgtatttatgtcttaaaaaaaaaaaaaaaaaaaagaaaaaaaaaaaaaaaaaaaaaaaaaacagaatttaaaggtcccggcccggcggggccgctcatgctgagtagaagcaggttgccccccctgtacgcgggatccccttcgcgttttgcggaacccctttcataggggtttcgattttggaattgtcacccgcttccaattctcctcatactttcagccggagggttaaacgtaaattcccgcgaggcctaacgcgggaactaattcacccttaatggggttgcgatcacaggccccttgttcaggcggtaaacccggcggggcagggtgaattattgaattggcccaacttaagggagaag

SEQ ID NO: 14939 - DNA, 547 bp, Glycine max
  Coding DNA Sequence Number=SeqID_5160
gtacgatgtcgtatttccacatgcaattcccgttttgcggtgtagatcattgtctacctattcgtttcggtcttcggataggagggctgtacttactctgtgatgtttgcaagtgatgtgtggagcgcacggcagcgaagatggccgtcatgttttgaagataatagctatgacgacgtaacacgatcgcggcgtgtgtttcgtgtattatccagttcgctgagcataagtctactctcgtcttttatacgttgtgctatcagccaccacgcgtgaacgcgaagcagacttcaatcagtataatacatacatggggggaggatgagaaggccccgcgcccgcgacaaacaagaagcaggaagcaggggaaaaagagttatataaggactcagcatgtaggtcgatccccacccaccaccctcgcccgcgatcgggtcacccgcatcggagtacgaggtcgtgtgcctgtttgtatatacgggtggttccgcgctccctaccgccagcacgatgtcacttttctaatgtgtgtgttttgtctcctgca

SEQ ID NO: 14940 - DNA, 587 bp, Glycine max
  misc_feature (335)..(335): n is a, c, g, or t
  misc_feature (451)..(451): n is a, c, g, or t
  misc_feature (463)..(463): n is a, c, g, or t
  misc_feature (505)..(505): n is a, c, g, or t
  Coding DNA Sequence Number=SeqID_5161
acgctctgatgtggtatgacttcgcggcacaacataatgtgagtctgctcatctggcccgaccacaccctcacctcactggctgtctgcacatctcgacagtattgattgaaaatcaaagtacctgatagttacacggataaggtgggcactatgatctacggcgcgcgcgtagttataatcttatcgtccttctgcagcgcgcgccaacatgcgatgactaaataataacgtggcgcgcgagactagatagtcatgcagactattgtctcctctccgcctcctacttcactgttgcagaattgtatagtatatatgaagatgtgcgcttgtggncccccttgtgttcttgtgtgagcccggagatgatacatgcgatgtcatgctggacattatatgagtgtgcactatgtcagtggcgatgaagacacaccgcgctcgccgtaccaccngtaggacgtatngtagacttcaagcgtggctggcgctattgtatcatgtaaagngccacacagcgtagattgtgtaggcattgcacagtctgacgatgctatgcatatgcgggcgagtatcacatattctggtcat

SEQ ID NO: 14941 - DNA, 577 bp, Glycine max
  misc_feature (37)..(37): n is a, c, g, or t
  misc_feature (44)..(44): n is a, c, g, or t
  misc_feature (153)..(153): n is a, c, g, or t
  misc_feature (265)..(265): n is a, c, g, or t
  misc_feature (282)..(282): n is a, c, g, or t
  misc_feature (287)..(287): n is a, c, g, or t
  misc_feature (325)..(325): n is a, c, g, or t
  misc_feature (339)..(339): n is a, c, g, or t
  misc_feature (361)..(361): n is a, c, g, or t
  misc_feature (401)..(401): n is a, c, g, or t
  misc_feature (421)..(421): n is a, c, g, or t
  misc_feature (436)..(437): n is a, c, g, or t
  misc_feature (442)..(442): n is a, c, g, or t
  misc_feature (507)..(507): n is a, c, g, or t
  misc_feature (520)..(520): n is a, c, g, or t
  misc_feature (524)..(524): n is a, c, g, or t
  misc_feature (527)..(527): n is a, c, g, or t
  misc_feature (545)..(545): n is a, c, g, or t
  Coding DNA Sequence Number=SeqID_5162
gtgcttgtacgacatacgtcacggagtgtcgcgacgntaatcgnaagacctcgtcagcagacgtaggtcgtagagagtcaatcagtagacaacaacagaacagaagcgtcgcacaggcgaggagaggggtaggacgcgcgagccgcagccgancacacatgcaactcacgaagcggagaggcgaggattgcacgaaatcgagaagagaaacggagacagtgaaaattgagtcaatataagacgtactacatactaagacgaactnagatagtacgatgtacntgtangagagatatatactaataatactagacgatatacagcnaccgtgttaaagtntctgctgctccgactcgcctantactattacacatatagtctatatgtagattatagttagnggatagcggctggtgttgtntctgtttgcaatttnnttatnataatacctacccgaaatgttgaggtgagtgataccacctagaggactataatagatatatggtngaaagaaataatnatgngtnacaaaaccataacgaganacgacgacgacgactgtgagcgggtgacacaa

SEQ ID NO: 14942 - DNA, 229 bp, Glycine max
  Coding DNA Sequence Number=SeqID_5163
aatctcccaactgtcgattacgaaggcctctattattctttttatcttaacggcacaaacttacgggtgcgtcttgtacatttaggggggaaagacaaaggtcttttcggccaagatttttaagaagtttcaattcctccaaatttgatgactgcctcttcagatgcatctttcgattttataccatcagctcttgcaacgtttgttcattcagaacctgatcgttttc

SEQ ID NO: 14943 - DNA, 392 bp, Glycine max
  Coding DNA Sequence Number=SeqID_5164
taccgaccgacaatatgcacgctctgaccatcatcttctccatggccgttgtggcggtctccgcccaatatcacggctccgctccttcctacggtggcgcttcccatggtggcgcttcctatggtggcgcttcctatggtgccgctccctcatacggcaagggagaagctacctccttccagaacttcaggctggagagcgtacagcagggatacggcaagccttcatacggatcaggacacggctacagcgctcctgcccctgcctaccacgctcctgcccccgcataccacgctcctgcccctgcctacaagccttcttacagcgctcccgcttacaagcccagctactaaacacctcttctctcgacctctgtcattcactgttattta

SEQ ID NO: 14944 - DNA, 578 bp, Glycine max
  misc_feature (27)..(27): n is a, c, g, or t
  misc_feature (95)..(95): n is a, c, g, or t
  misc_feature (139)..(139): n is a, c, g, or t
  misc_feature (207)..(207): n is a, c, g, or t
  misc_feature (277)..(277): n is a, c, g, or t
  misc_feature (345)..(345): n is a, c, g, or t
  misc_feature (347)..(347): n is a, c, g, or t
  misc_feature (357)..(357): n is a, c, g, or t
  misc_feature (374)..(374): n is a, c, g, or t
  misc_feature (389)..(389): n is a, c, g, or t
  misc_feature (408)..(408): n is a, c, g, or t
  misc_feature (413)..(413): n is a, c, g, or t
  misc_feature (418)..(418): n is a, c, g, or t
  misc_feature (454)..(454): n is a, c, g, or t
  misc_feature (461)..(461): n is a, c, g, or t
  misc_feature (464)..(464): n is a, c, g, or t
  misc_feature (467)..(467): n is a, c, g, or t
  misc_feature (476)..(476): n is a, c, g, or t
  Coding DNA Sequence Number=SeqID_5165
ctcacagtgtgagtgtcgtacagacanaaagacacgcacgttcacatcaataacatcatgcgttgcctttcaatacgtatgctatacgcatagtngtcagtctcacatacgaccacggcggagagcgagtcagatcgtntggcaggcgtaccaatctgaatgttctgtctgatgcggtctgcgctcgatgggactaggcggtagcgnacgcgcgacgtcacacgaccatcgaccgtcatcactcgcgcttcgcactcgatcgaacgtcgactatcantacaagagtacagagcgcttaccctacgcgcgtgacgtatgatggaggatcatcagcatcgagagcancncacgcgcacnatctactacatctacgntcatgtgctgctctncgcgtcaggcgcgataatnatatnatcgntgagtgttatagtgatatgtcgtcgcctatcgcacngagatgnagnatnaaatctganagtatcggttctcgtggagtagtagagagagcacgtgctgacgagtgtatctcgctctcttgactgctcgactaagtgctacacgttgtatgtcgaagtcta

SEQ ID NO: 14945 - DNA, 480 bp, Glycine max
  Coding DNA Sequence Number=SeqID_5166
atggctgacaccacctctggaatgagcatggataagatggcccaacaagccaaagaagccgcttctactttagctgaaaaggctaagcaagctgtaggtcaaggaagctcagcaactgaaacccttaaagattgggcttccactgctcaagaaacagcttccaaagtaactgaaaaggccaaggaagctgtacaaggatctactactggttatgttgacagtgccaaagaagcaatgaaaaacataaaggaaggagcatctactgttactgagactgctaaagaatacgctcagactgccaaagaaaaggtgcaagatgttgcctcttcaagtactgttgaaaccatgaagaagaagggtgaggaaatgattggcactgctaaggaagctgtcaagaacgcctctgacaagatgaagaagtaaatatatatcattgattctacagaaagctataagactaaaggctttcttattgttaag

SEQ ID NO: 14946 - DNA, 548 bp, Glycine max
  misc_feature (75)..(75): n is a, c, g, or t
  Coding DNA Sequence Number=SeqID_5167
tatgactcactacgctacaggtcttacagcactagttatgacaatacagacgacttatactgcaatatcaacatncatcatactcacaattcgttacatatatcagacatctcaacagaacacggcctaggaaaggtcgcgcgagactagcgacgctaaatcatctgtaggatcatacaacgactaccggtgctgtacgcatatgaaacgtcgcttactgcgctgcacgcactcgacgctcggcgaagtcggcaaatgtgtgtggattgtcactcagacgcgtatcactccatctctgatcctgctcgcgtagatgattggtgagatgatgctccgatcacagacgtagcgccgcgcactagcgcatggcgcataacaggacgaacgctcatgcggatacagacgcacataccacacatagtcgtggctctgcatctctcgagatgtctcgagctctcgtgatcatacactttgtgcgtaacgtgcagcgtcgatggcgactacgcgcatgagaccattagtcactgcgaatagtgttccgcgtctcg

SEQ ID NO: 14947 - DNA, 556 bp, Glycine max
  misc_feature (510)..(511): n is a, c, g, or t
  misc_feature (513)..(513): n is a, c, g, or t
  misc_feature (517)..(518): n is a, c, g, or t
  Coding DNA Sequence Number=SeqID_5168
gatgacatatgagacgacacgcagcaaacacgaagcataagaagcgcagaaaagaaaagaaggacgagtatcagcgagggacggactagtctagccacaccgacagactagcgggcgccacggccgcgacagattgagataggaagagaagattaaattatcattataaagtaggtttttatatagaatagttgtaagcacgcgatattatattgaaaatagatgtatcgtatctcgtgtgtttgatgtttatagtacacacccttctatactttagacttcggtctatctcatcccactccattctctatcgccctactatgtcatctcacgtctggtgtgtgtagagatatccctctccactctaatacacgcggtagtaaaacagaagatgttataataaacgaaatatatatgtatgaagcgcgatatttttgtcgccacccggtggttgattacattgttacatacaaaaacacaacaagactactatcactatttcccactcannantttnnttttagggaacggagcgcgccccactgtttttgtgttt

SEQ ID NO: 14948 - DNA, 374 bp, Glycine max
  Coding DNA Sequence Number=SeqID_5169
tagtttctctctaaagacccctctttcaaaacagagccgcctccactccggcccggtgctctgccggagccggaggtaaatcctccttccctgtctcttttttttcctttgcttccctcttcttctacctcacttcagaaccgatataccttctgctctgaacctatcgattcctttaccggcgacccttagcggttaaaggtaatgacaatcgacgtcttggaggagcggtgaggatttgaagcggtagtcgcgagggaggccggtttttagggctaagtgaaccgcctgatctagtttcaccttttaagatctacggtggctctcttcacggcggggcacgtgactcagtgggaagctcctccaccttggat

SEQ ID NO: 14949 - DNA, 353 bp, Glycine max
  misc_feature (29)..(29): n is a, c, g, or t
  misc_feature (61)..(62): n is a, c, g, or t
  misc_feature (74)..(74): n is a, c, g, or t
  misc_feature (81)..(82): n is a, c, g, or t
  misc_feature (233)..(233): n is a, c, g, or t
  misc_feature (238)..(239): n is a, c, g, or t
  Coding DNA Sequence Number=SeqID_5170
aaatgcctcttttctcgtcccatgccccnaagtgtctacacttcttcttctccccccttgnnggtgaatctctnaatgttnncatttcaagggtgttgagcttgaagcctttctcttcatcggatctttgtctgctgaatctgctgcatcaaggattcagtgccttaacaggaaagcattttctggtctggaagctactaaaagtgaaattccattctgccccctgtatggtncatgnnacctatgttgcttcatcgaaagaaaagagtgcataatgaaaactctcgggggtactatccagatgatgcttcaattatgcattcatgcctcagttccgaccctggaaaactcgg

SEQ ID NO: 14950 - DNA, 557 bp, Glycine max
  misc_feature (363)..(363): n is a, c, g, or t
  Coding DNA Sequence Number=SeqID_5171
gaaatgccgcagacaacaaaagactaacaagacgacggccgagcgcagcgggacgagcaataaacgccacgcttaggcgtcatctcttccgaacagccacttaacacaaataaaaaagaaccaatcacaaataggcgaccatgcccagccgagacggagggagagaaggatacgctacgagagaatggggcggcccgcagggaacaagctccgactagacagccgaccaccagcggggcgcggccgcagacgaaacaatcaagaaccaaacaaaatagaagaacgcgcaagcctggccactcgcccgctgcccccacacacacgaggcgagccaccacagtgcgcccaccccgaagcaccgcnagatgcagggtgtacgcggtgaggggtgggcgggagcgggggcagaagcagcgcgacacacaaaaccacgcccggcctcgcgttcgaagaccccacccccgttacaacaaacgcaggctgggccggagccgcggccgccgggggcccgcggcttgacggccgcgcgcccgagcacggagctaacccaaccgaac

SEQ ID NO: 14951 - DNA, 385 bp, Glycine max
  Coding DNA Sequence Number=SeqID_5172
gggatcgatcaagggaaactctttctgcatcaaggaatcaaagcaagtcgattgagcttcagagatcaaagtcaaaggattctatcaaaagaaagagtctttattcgattttaaggacctcaaagcaaccctcaaataacgacaatcagaccttggattactttaaagatatgttttctccgataaatcgagttggcatcaatacaggaagagatttcaccatttcacctcaagcattacttgcctcatctctaacttcatttggctcgccagtgtatagtggcagaaatgcagagcataattattttcagagaaatttttctatgcacgagtcgcttgataacaaccatattagtccacgaactcagctttccgtggctcaaaa

SEQ ID NO: 14952 - DNA, 261 bp, Glycine max
  misc_feature (31)..(31): n is a, c, g, or t
  misc_feature (47)..(48): n is a, c, g, or t
  Coding DNA Sequence Number=SeqID_5173
actgtggcaggtaccctgaacattgcctgangaagtcctttgctagnntggagcacctccaaggagtgatggtccaaattattactcccccatgagctccctggaggctgatgcttttttggtttgggtttccaacaaaattttggatccattggccgttcattaaaggcattttttgagggaactgggaggccttttggggaaaccgggactaaccagaaaggggccccggggggtcttttattagccaaattcccccag

SEQ ID NO: 14953 - DNA, 309 bp, Glycine max
  Coding DNA Sequence Number=SeqID_5174
ccgtgcacaagttcggccggcgcaaggacggcgccgcggcggcggagtgagcctgcaggctgctggtggcgcgcgcaagtggttgctctgctccgcgcaacgctcgtcgtctagctagctccgagctgccttcgttttgcctggtcaacgcgaggtgtcgcgataagctttgaccgtgatccccttctgtttggtcagcatgtgcgttctgccattgtgtgaaacctgtggtaacttgtacgaagtgggctagctacttgtgtatgtataatgcacaagctcatgccatggtggtttagctacttgtat

SEQ ID NO: 14954 - DNA, 300 bp, Glycine max
  Coding DNA Sequence Number=SeqID_5175
aggcattggccttccagaggccatagaaattttttatgcttgcatatagtaacgtcagagccactgctgcgaggatacgacgaggcggattgtatatgccattaaggcacacagatgtacaggactatgccgctgcatgtgctgacatgggaactgactagtcaggagggcaacggcattacctacccctttctcacgtcaatgcaaatcagggggctctcatgacctgacgcaggaccaggaaggcctgtgatacctattgccaaaggtagagggtacaccagggatcgagcgcgacga

SEQ ID NO: 14955 - DNA, 568 bp, Glycine max
  misc_feature (38)..(38): n is a, c, g, or t
  misc_feature (40)..(40): n is a, c, g, or t
  misc_feature (101)..(101): n is a, c, g, or t
  misc_feature (105)..(105): n is a, c, g, or t
  misc_feature (126)..(126): n is a, c, g, or t
  misc_feature (158)..(158): n is a, c, g, or t
  misc_feature (167)..(167): n is a, c, g, or t
  misc_feature (208)..(208): n is a, c, g, or t
  misc_feature (259)..(259): n is a, c, g, or t
  misc_feature (270)..(270): n is a, c, g, or t
  misc_feature (368)..(368): n is a, c, g, or t
  misc_feature (382)..(382): n is a, c, g, or t
  misc_feature (435)..(435): n is a, c, g, or t
  Coding DNA Sequence Number=SeqID_5176
tactcatctacctacaaacacaacgtgaggcaattacnancgcacaagattatatatacgtatatagcgatgtataacgacgctcctgactcgatacatgntgtncgagctccatatagcatacanacatcactgtcgacagttagagctgacactantctccagancatactgcgcacaacacaatgtctcaacttactatatagtnatctatattcacactacactgatacaacactcactacaagacacataacanagacccgaccntacacgcagctcgtcgacgcgcgcagattcatgataactcgcaacctgtatctcggtcatgcctctacaccgcgtggctctgcacacagcgagtcgtnatagacgacacttncaccaccgcactcgtggcgtctagctgcttcactatctcatcgctgcgcgcgngcgcagctgctgcgcgtagcagaatacgccgatcgctagttaacttgcatagagttgactctctatacacgtgctagcaccactatgatcgagtatatcgacgacgagcatgcagctgtgtcgacctgactat

SEQ ID NO: 14956 - DNA, 256 bp, Glycine max
  Coding DNA Sequence Number=SeqID_5177
agctcttcaaaaatatgacatgctacgtaagcagggaggtaccaagggaatcgaagctttatgcaattcctgcttttggcggcataattttctgggagggagaaagggcaccttttggtgaatctgaccagagcatttcttatcagattgttgacagggaagcacaagggcatccgttcctctcatgataatccgtacaaccacagtgggcttatgagtgtgtgaatgcacgatattttttgccaactgaccatta

SEQ ID NO: 14957 - DNA, 348 bp, Glycine max
  misc_feature (30)..(30): n is a, c, g, or t
  misc_feature (51)..(51): n is a, c, g, or t
  misc_feature (54)..(55): n is a, c, g, or t
  misc_feature (174)..(174): n is a, c, g, or t
  Coding DNA Sequence Number=SeqID_5178
gcggaggcgcggtatgaatctcataatagnataatcatgaagtaaaataanaannccgtactgcctcagtgtgctctcgagtaacttcgcgcgctggcgtctggtcgggcgctccgagcgacggacggcgacacatgctcgtcgctcaagcgcggcgcagagcagcgaggcagnatgcctacacatttgagcaggcagagcgctacattacgctcacattctatagcgtgatgatgcacacacactgccgattgcaacgactgagtgcaccacgcgtgcacaaccgcacacaccggtcgaatagtcccgaacacgccgcgctcgacacggcgtaatgcgcggacttac

SEQ ID NO: 14958 - DNA, 127 bp, Glycine max
  Coding DNA Sequence Number=SeqID_5179
caaatgagttgacttgaggtacgaaaataaagtgacttctgatggggttggttgttgcgtccgtcgaaggatatggggtactcggctgagcacttcacattatgtaggatatcccttaggaaaaata

SEQ ID NO: 14959 - DNA, 279 bp, Glycine max
  Coding DNA Sequence Number=SeqID_5180
aagcccttttgtacttcggagagagaaattggtttgcaccgccccgccgcgggccccagcttttcctttagggcggggaaataatccctgaaaaaagggggaaaaccccaaattcacaaaccggccccccaaaaaaaaaaaaaaaaaaaattgtgttccccggacccgggggtattttaaagggttggggaaagggcacatcaatccctgaaacgaaatctccttggccattggaatccataaaaaggggtccctcatttcccacacaattaacttccc

SEQ ID NO: 14960 - DNA, 520 bp, Glycine max
  Coding DNA Sequence Number=SeqID_5181
gagaccgagcaagggcttcgagccatcggtcttggagctgccgaggccaccgtcaaggcaaccttgatcaacggagtcatcggacccaagaccagacctgaaaatgctacgacgtcgaagttgtcaatatacatagagaacatccaccaagggatccacggaagtgacagcggctcgtacgatgctcaaggaaggtttgttcccgtgaagttcaacgagatattcaccaagcatgccaaggtcgaaccgaacgctgtgaacgagagcgagctggaggcgatgcgcmccgcgaacaggaaggacggcgacgacataggaagggcggcgtcgaaggcggagtgggacttgctgtacagcctcgccaaggacaaggacggcttccttcacaaggacaacgcacgcaccgtyttcgacgacaccctyttcgttcagctggcgaagaagggcggctcgtctcgaaattaaccaagcatgatttgcatttgtatttgtacttgtcctgtcgttgattgttgattac

SEQ ID NO: 14961 - DNA, 539 bp, Glycine max
  misc_feature (136)..(136): n is a, c, g, or t
  misc_feature (370)..(370): n is a, c, g, or t
  misc_feature (510)..(510): n is a, c, g, or t
  Coding DNA Sequence Number=SeqID_5182
cccgcgccacctacgataaagtgaaatactacacaactcactgcagaggcacgacgactcaggcacggcatccgctacggacctaaccagaccatgcacacggaggaccagcagcgcgcgcagagcagcgacgctncccaacccgccgccctactccgcgcgtctcactatccatatgtgtcatttaagacatcacatcttatatatcttctaacatagtgaattgacactgtctgtacatacatatatatgtagatcgtctagagatgaggatgagagcagatgaggatgtctgtcctaggagttcgtgtatcgcgtggataacacgtacgcattctgacaacgcgacatctatttctctgctgaccgntcttcatcgctactgtctctctctatccgtatcacctccttctcacatctaggcgctcaacatccacaacgcgcgaattcggattaaaaattgacgcgcgcgaagattaacagttagcgcgcctatatgactatgtatgntcgcacagctcagaactctcgtagtacac

SEQ ID NO: 14962 - DNA, 587 bp, Glycine max
  misc_feature (36)..(36): n is a, c, g, or t
  misc_feature (147)..(147): n is a, c, g, or t
  misc_feature (154)..(154): n is a, c, g, or t
  misc_feature (161)..(161): n is a, c, g, or t
  misc_feature (168)..(168): n is a, c, g, or t
  misc_feature (207)..(207): n is a, c, g, or t
  misc_feature (407)..(407): n is a, c, g, or t
  misc_feature (422)..(422): n is a, c, g, or t
  misc_feature (446)..(446): n is a, c, g, or t
  Coding DNA Sequence Number=SeqID_5183
taaacagacatatggagcgcagaaaaggcaagaatnatccaagatagcgtaagtaaacaatacacaacatcgtatttaaacacaaagaatagaatctgagactaagggcaatataatcgtacatgtatcgtagctcgcgctgatacnatccatntcgtatncgccttncatcagtaatattatcaagcgcaatcgtagtcttgctgnatggtgcaatctataatagcaacactcacaatgtgcataatatttgagtcgtggtggatagaaacgaagagtaatgtaatagatagagagtcagaacatgacaaagcacaagtagacgtaatatatgtcgaggatagcagttctgtcacatgcggacacgcatacatccatcacaccgccacacagcacaaccgcgcagntcacacacgcgccgngatcaacaggagtagtgcgaatanacattggaccgggagacaacaggccggggagactcgaaaaaaggccagagtaggagcgggtagtagaggcacagacacagggtgcgggaaggaaaggagatggggagagagtgcaagaaagacaacagaccaacaacacaa

SEQ ID NO: 14963 - DNA, 513 bp, Glycine max
  misc_feature (59)..(59): n is a, c, g, or t
  misc_feature (97)..(97): n is a, c, g, or t
  misc_feature (99)..(99): n is a, c, g, or t
  misc_feature (192)..(192): n is a, c, g, or t
  misc_feature (333)..(333): n is a, c, g, or t
  misc_feature (414)..(414): n is a, c, g, or t
  misc_feature (466)..(466): n is a, c, g, or t
  misc_feature (468)..(468): n is a, c, g, or t
  Coding DNA Sequence Number=SeqID_5184
gacacggcggtctcatcacgactatcgctcagtgggacgccggatcgcctctcttctcntgcactcgatcgctataccggacgacgcatcgacgcgncnccacgcgatgtgaggatcggtatcgcgcgagagatgcagcgtgacacagatgacagagattagcgcgagtcgcgtgaacgtacgtatctctcnatacgtcgctatgactgcgcgtctgctgtccgccgcggtgcgccgagcgagtaggagctgcttatacatacgtgtggattctgtcggtctcgctgatagtagcatcgatcgaggtacgatgatgttacgcttcatcctttngacgtcgaactctagcatgtgtgcgtagctcatcatctacgcgagcacgcatcacgcgtcgagtctagctatgactatgangtacgagcgacgctctgcacgtcaaccctgctcgcaccggttgtgacgcatncnctacgtctcggatctcacgagaagtacgcactcttgaatcaagca

SEQ ID NO: 14964 - DNA, 577 bp, Glycine max
  misc_feature (194)..(194): n is a, c, g, or t
  misc_feature (267)..(267): n is a, c, g, or t
  misc_feature (282)..(282): n is a, c, g, or t
  misc_feature (535)..(535): n is a, c, g, or t
  Coding DNA Sequence Number=SeqID_5185
gcaccgttgcgcttgattagcacaccatcactacatcgtacgctgaggatgtgtactacatcataagaaagtggcatacgcgtaggaatggagagagtcaccatacatacaacacgaataagaacttacatccatgtcatcattggctcactatgtccgatctcaatgatgatatacagcgatgtcatcacgtngaacgaaagagatgtcgtcgaccacaacacgcctcgcgcctgtcgctcttcacactcatgtacgtgatatatncatcgagcgttatcngagtaactaattatgtgcgtctattagatcagatatcaacactacacttcaactaacccacttgatactcacgctactcactactctcgcgtcacatgattagattcctcatattctctcatccgtgtcggcggcgtggatatgtccgctaacccatatgtctaacacgtcgcttagcttcagcaccgcacctcataatactcgtcactgctgtaacatagactacatgcaacgacagctcagcagactcgangtagggtccacgagtacgtcatgcgcacgactatgctgagat

SEQ ID NO: 14965 - DNA, 562 bp, Glycine max
  misc_feature (27)..(27): n is a, c, g, or t
  misc_feature (63)..(63): n is a, c, g, or t
  misc_feature (185)..(185): n is a, c, g, or t
  misc_feature (220)..(220): n is a, c, g, or t
  misc_feature (249)..(249): n is a, c, g, or t
  misc_feature (293)..(293): n is a, c, g, or t
  misc_feature (311)..(311): n is a, c, g, or t
  misc_feature (314)..(314): n is a, c, g, or t
  misc_feature (336)..(336): n is a, c, g, or t
  misc_feature (430)..(430): n is a, c, g, or t
  misc_feature (437)..(437): n is a, c, g, or t
  misc_feature (518)..(518): n is a, c, g, or t
  misc_feature (522)..(522): n is a, c, g, or t
  misc_feature (527)..(527): n is a, c, g, or t
  misc_feature (535)..(535): n is a, c, g, or t
  Coding DNA Sequence Number=SeqID_5186
gcagctgatctacgcgcacgactgcgnccgaccgcgtagatcgctgcgactcacgacctaccntcgcgcgcaccaacacacaccaactacgcatcgactacgcacaatagcatatctactactaacacgacgctacaacagatgatctgtaacacgctactacatcatttactctctcactatantgatactaccatacgatatatatgagtgtcgactnacagagtactgatagtcctactcgacgantctactacgcaacacacacacatcactgtcataactagtataanttcctcctgtctgaatcnctnattgtcggtataatgcattaanacgaggatgattatatagtagtcgtaacgacaataacacatctgaactcgtcgtcatcatcggggtactctcgtactagtacacaggagacaantcactanctgatctatcatccgacttctataatactatagatacttagcagtagcagctgtcgctacccagctctgcagcgttactangagncgtcnctaacganacccgtatgcggcggacgcacagaaaa

SEQ ID NO: 14966 - DNA, 552 bp, Glycine max
  misc_feature (265)..(265): n is a, c, g, or t
  misc_feature (281)..(281): n is a, c, g, or t
  misc_feature (373)..(373): n is a, c, g, or t
  misc_feature (436)..(436): n is a, c, g, or t
  misc_feature (471)..(471): n is a, c, g, or t
  Coding DNA Sequence Number=SeqID_5187
gcgacgtcatctgatagctagcctatgtcagctagtgtcccgctcctacaacagaacacaactcgtatgatgtcgccgcacgctgtgagcgctgctgcgcgtgtgtacgtcttgatcaactctgtgatactatatcattacgtcatcatctcgagatccgactagcacgccacgctcgaatctacgatgtatatcgtcttctagtacggtcgtgatatgtagtagcactgtatgtctgtgaattgtgtattagcacgaacgatcngcaccatgcatcacangatatctgtcgctcacttgtgctgtgcgcagagtgctcgctacggtgcgtagtgtcgtgcagcgtgatgtaggtcgaggggtgcggagccgncggcgtgacgtcacgagacgacgtgaggccgaggcgtgatcgtgcgcgctcggcagccgcagncgatgagacaccgtgacgtatgaggagtcgagtgnacagcgatgaggacatcgctacgtctcgcgctgtagaccatcgtacgtctgtgcttgagcttagtgtcgtcttcttataac

SEQ ID NO: 14967 - DNA, 594 bp, Glycine max
  Coding DNA Sequence Number=SeqID_5188
ttttggttcacctggcgtcgtctcttcgcctgcctatgtctttttagtttactttattttttgttgcttttcttctatgttttctggttctcctcgcctccccgcccgcccccttccccctccccgacccgggcccccccccccgcccccgcccccacaccacatttgttcttctttttgttttttttctttttattagttatgaagtcacgtcaatacacacacaaaaaaaaagaaaaacataagtaaacaaattctctggtgttgtctttttttttttttgagtttattttttgttgtttaaaacataagggtttttgtcatttttcttttttattttagcagtccacaccaacaatttgttttgcgattcttgtttgttcacgcagggagaaaaatgttttttttgccgcccaccacgcaggctgccgcacccgggggggggtgcgaagaccccccccccgctttttttttttttttgaagaaaaaagccggggcgcttcccctcccccccaccgccctccgggggggcggggaagttcccccccccccatttttttttttgtgttttccatctctttccttccgttgttt

SEQ ID NO: 14968 - DNA, 546 bp, Glycine max
  misc_feature (56)..(56): n is a, c, g, or t
  misc_feature (66)..(66): n is a, c, g, or t
  misc_feature (104)..(104): n is a, c, g, or t
  misc_feature (115)..(115): n is a, c, g, or t
  misc_feature (144)..(144): n is a, c, g, or t
  misc_feature (149)..(149): n is a, c, g, or t
  misc_feature (168)..(168): n is a, c, g, or t
  misc_feature (212)..(212): n is a, c, g, or t
  misc_feature (220)..(220): n is a, c, g, or t
  misc_feature (231)..(231): n is a, c, g, or t
  misc_feature (259)..(259): n is a, c, g, or t
  misc_feature (261)..(261): n is a, c, g, or t
  misc_feature (265)..(265): n is a, c, g, or t
  misc_feature (297)..(297): n is a, c, g, or t
  misc_feature (305)..(305): n is a, c, g, or t
  misc_feature (309)..(309): n is a, c, g, or t
  misc_feature (315)..(315): n is a, c, g, or t
  misc_feature (331)..(331): n is a, c, g, or t
  misc_feature (337)..(337): n is a, c, g, or t
  misc_feature (357)..(357): n is a, c, g, or t
  misc_feature (359)..(359): n is a, c, g, or t
  misc_feature (362)..(362): n is a, c, g, or t
  misc_feature (407)..(407): n is a, c, g, or t
  misc_feature (440)..(440): n is a, c, g, or t
  misc_feature (443)..(443): n is a, c, g, or t
  misc_feature (472)..(472): n is a, c, g, or t
  misc_feature (482)..(482): n is a, c, g, or t
  misc_feature (508)..(509): n is a, c, g, or t
  misc_feature (513)..(513): n is a, c, g, or t
  misc_feature (516)..(516): n is a, c, g, or t
  Coding DNA Sequence Number=SeqID_5189
ttgtcatatagtgagtcgacgagtcagtgacgatgacgcgcgcgaattgctaagtngaacacgtcntagctccatgacacgtcatgtcgactgcatcgcgcgcnaccagcgctancagcgtaaaatactaacgtacagtgaccngacgnacatgctacgtcgatactnactcagcatacgatcagcgctaccactcctctactatgcttgantcgtactntacgaccggcngacgctgactcactcgacgcactctgtncncgtngcgatacgagcatgctgcgccgacgcgacggnagtctacngcgntacctncgtactactgatctantaccanatactgaatgctgctgccancnacntatcatgctacgtgtcctacggtcgttcgccgtcagcagagctgnactatactactatctctgacatctgatgtcgcntgntcgggcgagtcatcatgtgcgtgtagtantgacaaccanacactgctctagtcgtcgatatcagnntatncantgacgcatacgcgccgtactcagatgtgct

SEQ ID NO: 14969 - DNA, 573 bp, Glycine max
  Coding DNA Sequence Number=SeqID_5190
acccgttacggaccaatccacatgaatcgaggtggcccgttttgacagctccacagaaaactgacctgtaattattatgagcctacgtacccagaaggcacgcgagttgatggacgttttactaagaatgtcccgaaaaaagaaaagaaaagaaaaagaaatagtgactgttcatccatgtaatcatatacagtgattggttctgactattagttagtcattggctgcctacccgaattttacacagggactgtgattggcgtttaccattacacaatcaaacagagtacatgcaaatttgtaatctttttgtttctatatcattcgatcagagagatgaaccaaaagaaacatctttgcaaatcaaaaaaaaaaaaaaaaaaaaaaaaaaaaaaaaaaaaaaaaaaaaaaaaaaaaaaaaaaaaaaaaaaaaaaaactaggggggggccccggaccccaattaaccttatgggggggggttttaccccccctcattgcccgttgtttaacaacttcgggcctggaaaaaccctggtgttaccaactttaatcgcttggaaccacttcccctt

SEQ ID NO: 14970 - DNA, 515 bp, Glycine max
  Coding DNA Sequence Number=SeqID_5191
aatatctttgacaacacccacagcatacaggtagtgatcactctgcatatatgcaccccaccaacgtgcgcgcgggaggcgtggcagccccaacccacacgcgtggggagcagagattgctaagatacatactatcatatcttatgagtttgagtagttagtgcttagctgggcgttgtggtgccccttcatcacaggccagggctggtgtgtggtgggtgtgagatcgctgccgtacacaatatccatagatatgtgctgtggctaatggctagatatattaggctatgtggctgcacgacagctactaggggactccagatggctcgtagcgtgtgctcttataatgaagagacgtccgtgtacacaggtctctcttgctctcacactatgagctgtgaggtctactgtgcagagtgtgtaagcatccagagccaaacacaccatggcgggtgttgcgaagctgagggtgggggggcgggggcgcacctcacgtcagacacagctccgagcgg

SEQ ID NO: 14971 - DNA, 483 bp, Glycine max
  Coding DNA Sequence Number=SeqID_5192
gaagccactccctttttggtttatggaatgcccattttggagggtcaaaaatttttctgaaaagagtgtaggaaccaccttaggaagtgctggaagtaccacccttggatggggtgtaatgggaaattttgggatggacccagtttttaaggtgtatgtatgtagtgctgacctgtgttttcaggggcttggcaccctccccctactttttttttaaaatgtaaggtaaatgttgttttctttattttccaacccaagtttggtggttttggcatttgtttaagggatgaaaagggatttttggttggggggatttttttttgtagatccatgagggagaggttttttttttgttccacctccaaagtgtttgatagaatgccccacccccctttaaatgtttgagtgttgagtcctataggaacattttttatgtaattgcccattccaagggcattttttaggtaattgctcattccaggg

SEQ ID NO: 14972 - DNA, 539 bp, Glycine max
  misc_feature (513)..(513): n is a, c, g, or t
  Coding DNA Sequence Number=SeqID_5193
gggcttgtacatagacgcgcctcgcgctctgcgttgggcgattaatacagattgtgcgtgtgcgaatcgttaagcgggtcggtcgagtactatatgggagggcggagtgtgcagctcgcgcggcggggtgtgcgagaggagggaggggggctcggtgtggtgtgccccgctggggacttatgactctcttagatttcgcgctggatgttgggttggatgaatcccattctgtggggcgccgtggccttcccctttatctaacacttcctccgacgccgctcgggagatgtgctgtctctcccggcgtgcgggcggtccgcgtctacctacgtttacagtagtggtctagcgtccgcgctcggcgtccccgttacactctcttagacgtcttttcggccagctggcctcctcgtggactcacccaggggggcttaggtaataagcgagtacgctcttacctccatctagagggggcggggtggctgacgaaaaacaacccagaacagggggggngtaataccacctctaccactatggtg

SEQ ID NO: 14973 - DNA, 522 bp, Glycine max
  Coding DNA Sequence Number=SeqID_5194
agagacggcaacagctttggtggccggcttgaccgagcagagcttcgtcttgggcctcgattttgccctaaaggactctcagtcacaacagacaccggcgtcgtcgtcctcgtcatcaatggcaccggagcagaccaagggtgagaacaagatcggttacgatgcgaagctgagctacctaatggaggagtacgggcagatcctcatagtgaactccgatagcgagggatcgaaccagcttccataacagtcgcaagggtctccgtggcgactccgtcgtcctcgtggggaagaacaccatgatgaagcgctcatgcatggatgcacgctgagaaaaccggaaacaacgcctatctcaaccttatcccggctcttggtggcaggtgagattgattttcaccaaggggacctgaatgaggtcagtgacgaggttgactagtacaaggatggagctactgctcgagttcggtcgttagcccagatgatggtgatggtcctcctggcacagagggctcgatctct

SEQ ID NO: 14974 - DNA, 540 bp, Glycine max
  misc_feature (310)..(310): n is a, c, g, or t
  misc_feature (366)..(366): n is a, c, g, or t
  misc_feature (368)..(368): n is a, c, g, or t
  misc_feature (400)..(400): n is a, c, g, or t
  misc_feature (414)..(414): n is a, c, g, or t
  misc_feature (451)..(451): n is a, c, g, or t
  misc_feature (454)..(454): n is a, c, g, or t
  misc_feature (482)..(482): n is a, c, g, or t
  misc_feature (489)..(489): n is a, c, g, or t
  misc_feature (492)..(492): n is a, c, g, or t
  misc_feature (496)..(496): n is a, c, g, or t
  Coding DNA Sequence Number=SeqID_5195
taaatcccctgctcatgacctaaatctctcacgcccaccctcgcatggaatagcagtgaactacgccacaaaccatgtcatcgtgtgcgatttttattgtatattaacaccacactgcactatcatccacaccagacaacgtcggacgagtaggagtggagtgccgcgtggagtgtgtgagggcgccgcgtttatccgtgtgacgatggatgttgtagctgtcgcatcgatatcgtcacacgttctgtcggtgtgttgaaatcatccttttgcttgtgggtgtgcgtctgagacaacactgcgtgctctntgggatgagaatcctctgctctctatcatcagggatctcacgacctctcgtgtacntntgtacctctccgctctcatgatagcagtctcntctaatgacgattnagtatgtgagatgtcgtatacatatacatgctatgtntancttctctctatatactctacttattccntatatcncgntcanaccatcaccgccacacctgatcatatatgtcgtggcaggcgtgc

SEQ ID NO: 14975 - DNA, 532 bp, Glycine max
  misc_feature (334)..(334): n is a, c, g, or t
  misc_feature (440)..(440): n is a, c, g, or t
  misc_feature (476)..(476): n is a, c, g, or t
  Coding DNA Sequence Number=SeqID_5196
gtgtagctgcgctggatacatgacaggtgaggtaaattcgctcgcgcgtcttgcgcgcgctgttatgaaagagcgtgctgcaatggtgatatgcgcgctcgcacatatgtcaatataataaatatcgcgcgcgcgcagaatataacgagtgggtgtcaggtgtggagaaaatatatgatagaatagcgtctgaaggaccggcgcgcggcggcataatagatagaaacaatacgaatcgggtcgaacaatcagctgcgatgctcgagactctgtgtatactgctcacaaacaatacatagccgccgctgttgtgtggtgcggaatatgtgaacanaccaatcatacacatcgcagacgcgggtgcgtgtaggcgtcacgctcgtatactacacactatcgcggagatattatacagcgcgccgcgccgcatgaaaatatangtcgtgagaatacgctggccgcgcgcgtcgcgcggntgcaaattgcgatgaccggtgcgtccgtcacgcgcgccatgcgacacatatatatc

SEQ ID NO: 14976 - DNA, 396 bp, Glycine max
  Coding DNA Sequence Number=SeqID_5197
cattagcgaatgtattatctgtctgtcgcataattgagatcggagtcacatttatgggctccaccaaatcatcatcgcctgcaacgatatctatgtgttgctaagaatgttggtgttccattcgagcttgacctgcaagcactggattgcgttgattgcgacttctttggcatatgttattccctatcaacacctcgcgaagatagcgacccctgcttacgctgaagatggagaacttgtatatggtggatctgatatgtctacaggtggagtttgaggatatttacatgatcttatctacataacatgctttggacaagggaatgtccatcgactctggaaagttctggtacacataatttgtgataccggctttttgaacataccaaacctttg

SEQ ID NO: 14977 - DNA, 524 bp, Glycine max
  Coding DNA Sequence Number=SeqID_5198
gctcactattataacgccaagacgtagacacattctcgtcaggcgcgctctccgtcacgtgctgtactttaatctatttcagttgtatcacgccagcgtccctctaattcacgcagcctacacgacgactcacacagcttactatgagcagtacacaagattgttggcgacgaataagttatacgaatgctacgtgaaatatatccatgctcctatacttccaacagaacggcgcatcatatacaactattacagagctactaatataagaatcggcagatattgataagatgctgttcgatgtcgagtctgccaactaagctgcaggctgattcggatcgatatttatacgactcgtactcattgcaagcttgattatatgttcttaaatgaactatgatactgcattctgactatgtcgcgtcgcaccgtctatcgctctcgcttcaacactatgctatactccatatctgagagagatagctcgcgacgagtcacggatgcatttgtagctgcgaacgtag

SEQ ID NO: 14978 - DNA, 587 bp, Glycine max
  misc_feature (240)..(240): n is a, c, g, or t
  misc_feature (339)..(339): n is a, c, g, or t
  misc_feature (424)..(424): n is a, c, g, or t
  misc_feature (497)..(497): n is a, c, g, or t
  misc_feature (503)..(503): n is a, c, g, or t
  Coding DNA Sequence Number=SeqID_5199
ataagtgcagcgtacgactcgtgcagcgtagcatacatatcgcgcctaagctgagtggcttgttgttaactcatagatagaccagtagcgtgcgagataagtgcgccccgacatctacccatcatctcctccgtcgcccgatttctaagagttgcacgataactttgcattaatcacgccgcctctacatgtccgccacatgcgcgctcgggcggtcacaactatagagaggtgtgacantgagtgtatggttcgtaagtgatggtgattggtagattagtgtagtgcaagtcgcgctgcatacacgtatacaccctaatcacactagccacactgtgnctccgcatacatcatatacagtaaacaccacacaactcgaacagctctatacaaaccacgcagccttatgaacatatagattatntatatgtggcgcgcttcacgagcttctcgtctccacttcatcatgatgagcgatggatgcgtggtgtgttgtnttagtngttagtgatcatagatatatagacggggttatcaccctacgccgttagtgggatgcgccagtaatcaggttgcagtccgcgcat

SEQ ID NO: 14979 - DNA, 587 bp, Glycine max
  Coding DNA Sequence Number=SeqID_5200
gcgagttagcggtcttcttatgtagtctcgggcgtgtttatgcggcgagcaggggctctcttctccgtgcgctgtatccgctcatggtgaatatcgctacagaagattactgctcatatggtcggtgcttctccgtcatacaagagatatttatagaatgccagctgccaggctttaaaatatcattccttgctcttgtcaagggtagattcgccatacacataactcaatgcgccgtcgggctcgatccttctagtaccagcttagatgtctcctatccataagtacctccgccctgcagaagctagcctgaggatgtctcttagtacactctttgcagagagagtactaccactgggatgcgccgctggggacacaacagcgcctccatacactcgatccatgccgacaagtccaagttaaatgttaatagtcccagacgtctttgtcctacttttctcctccaacaacaagagaacagaaaagaagatagccctttttcgtatggcctttcgcccctccgagggggagggcccccggtaccctcattttagccccacccaacattccgtctctatactgcatca

SEQ ID NO: 14980 - DNA, 547 bp, Glycine max
  misc_feature (315)..(315): n is a, c, g, or t
  Coding DNA Sequence Number=SeqID_5201
aggcaccaattctgcgctaacgatatcgcgttgctgcgtcggaccgattgtgtagattatgagtaatggattggcggagtataatgcgtgttagagttaggtgattagaggatagtgataatgtggtgcgacccgcgcgtagcgtaatacgatgaatcatgtgatccacgcgaggttatcttatatatgagtcttatatctcatatatatttatatgtaatatgtacaccagcgccagcgacgagcacctgatttagatcgctctacgtattatactgtgttctgcgtcagctcgctgtgttgctgtgagtatgncgatgtgcgtcacgtccgggcgtccacccgcgtcagcgggccacagtcgctagatgaaagcgcgcgcgtaagtcgtgtagatattaatgacaagcatttaatgacaatcaataatgctgtatagacagagagatagatgggcgagttgtcgcacctcgtccatcacttctcgtgctggcgtatctcccttcctcgccgtcgcgcgcgagcggtcatacgtcgggctctctca

SEQ ID NO: 14981 - DNA, 584 bp, Glycine max
  Coding DNA Sequence Number=SeqID_5202
ggacatttcctttgaaaacactcaatcagaaagcccaataaaagttttcccagttccaactatgtctgctagtttcaacccaggcaaccaacttatgaaggacaaagcaacagaatcaatgtttgggttcggatttaaggctgaaaggccagaagaggtattgatgacagttacaaactcactcaacaccaacccaatgagccctctggatgaaggaatgttaaagaagccaggctcagtgccatttagtggtatctcaggaattggaagtggaatccaagtgaacttgaacccaaatgccaatctgaatggaaatctttcagcaaagaaggagaatgacgataagaagaaatggagaaaacgtatttagacggctttgaaccctcttaaaatgtgtcgaaactaggattagatttaggatgttaagaggtggaggcaaaatttcgtaacactttgtgcatataaattcaatctttactgtgtctcattttgaaaagtgactgcatcttgttgttttttttaatattttttttagaagcgataatttattcaaagcaaaatgcatacgtttattgtttgatcta

SEQ ID NO: 14982 - DNA, 413 bp, Glycine max
  Coding DNA Sequence Number=SeqID_5203
aaagtttgtttcttacgcgcatccatccgcttcaattgacgaagggaacggggagtttcggaaagaggaggaacaagagtcacactctctgtgtcagatgtggtcgccgcagtttccacatccagaagagccgttgctccgcctgcgcttaccccgccgctcgcaagaggacctacaactggagtgtgaaggcaatccgtagaaagactacaggaacaggaaggatgaggtatcttcgcaatgtgcctcgcaggttcaagaccggtttcagagagggtaccgaagctaagccaaggaacaaggcagcggcttcatcagcttaaactttagtttttgtgcttctgagtttgttcgcaggataactgttattgatcatttgattagtaatatctttcgttgtgttttcttcttct

SEQ ID NO: 14983 - DNA, 415 bp, Glycine max
  Coding DNA Sequence Number=SeqID_5204
ttgctttcttgtccagcgaccgtttctctcaacgaagtcacgccaaatagcagaatatgtgcgaacccaacccagggttgcggcgaacatgggcgcattgtgcggctaggcgagtcgacagtagcgacgaaagcaccggcgacggccctatgtccggcgcgcgtctcgagagcggcgacctcgttatcgctcgcgtaattcacctcatcaggagcggcctgggttacgacatggcgttcaggatggacgccgagcataccgagcgcgtaggcaacaagttcgagttcgacgagtttaatttggagccctttattcaaacttgcatgagcacactctcctacaaaattgggaatcgatgcaagcgtagctggggtggcattgctgctaagggtgttattgctgtcgctgatctggc

SEQ ID NO: 14984 - DNA, 529 bp, Glycine max
  Coding DNA Sequence Number=SeqID_5205
gtggatggctggaaacactgttcatctctttagcattggtatcactttctctgctctttggcagcctctcagcgccctccagagcgttggaaaggtttttgagccattcaaggataacaaggtggaactacttatgcccaagctggtgtttcttgcccttaaccttggagggttagctttgggtatttggaagctcaacactttggggcttcttccaactcatgcatcagattgggtttcatctctaccccctcctcaggaggttgaacactctggcggaggatttgctttccactgatgagcatgtgtctctttgagataattacgaaagatacttaagtgatttgttcaatcctatatcatgaggggaagattcatgtggaccttctcatctcgtgatcttcttgtagcattttcaaaactctgaaaccatagcttttttcacttatggtgtgatgttcattgctcatcataactttgaattgtattattggcactgaaggaactttcccagcttttttatagacag

SEQ ID NO: 14985 - DNA, 525 bp, Glycine max
  misc_feature (37)..(37): n is a, c, g, or t
  misc_feature (125)..(125): n is a, c, g, or t
  misc_feature (401)..(401): n is a, c, g, or t
  Coding DNA Sequence Number=SeqID_5206
gatcatcgacgtagactcgctgactccgagcgacctnccgacatacaatgagtagcgtgatacatgctattatgacgaataagacgcggacacagataagatcactctcttaccaacgagctgtngcagacaacggagaatattagactctatcgttacacattttactagtgataagctgtcgctgtagacgacatatgacgttatacgcgcacggtagtaggagagttgattggtgtgtggtcacaggcgagtgtctgcgacatagatcgtagcacatgtaagtgacacagtcatcatgcgagctctactacacaacgatagcccgttcgagcagcgacagcaacagcatggagagagagtatagatatgaaatagatgtcgctaacatctgctctagntccatggacacacggacgtagagtcactacacatatatatagaagagagataggcacagtacgcatccaccacaacattctcagcacggcgtagcgagagataccagccagactattttgacac

SEQ ID NO: 14986 - DNA, 508 bp, Glycine max
  misc_feature (232)..(232): n is a, c, g, or t
  misc_feature (234)..(234): n is a, c, g, or t
  misc_feature (408)..(408): n is a, c, g, or t
  misc_feature (441)..(441): n is a, c, g, or t
  misc_feature (448)..(448): n is a, c, g, or t
  Coding DNA Sequence Number=SeqID_5207
tctaatcacaccacctatcatgttaatataacaactctatacatatactatcactgtttatcgtgatgctcgggcgtattttgagtaggttgatgtgagcggtatgtggtcttgcaggttgcctaatcattatatatatattaattatttgttgtgtttttacatttactagccattctttgcgacttgtgatgtggcttctattctttgttttattttcgttttccacgcnanttccgcgcgcactcgttacgccctgatgttcactgcgcccctcccagcgtcacccctgccctcttaccctttatgtcttatgtttatattgtggtatgtgtgatattagagtatagattctatatcttattatgtatataaagaaatgatacgtctccctcaacagtactcctnattgagatacaaacaagtgaacgactcgggcgngcctgtntcgcccgcccccccccactaccaacctccgcgacccagtggtccaccaggcctcgcgggt

SEQ ID NO: 14987 - DNA, 463 bp, Glycine max
  Coding DNA Sequence Number=SeqID_5208
ctgcccctcaaggtgcaattttttgcttgcgggagcaacctttggccatagaccttaattttggggaagggggaaaaattttttcccgttacctctttctggtgggggccagattcccccatcaagccaatgtcctgggtttgggtggtcccaaagccccaaggggttttccttggtcctacgaagtatttaatgttttttctttttctttcccctacccctcagcacccccccccgacgtggtaggttttgcttgcacaaacgaggcggtccagggttccatttgcttcttggaggggggtgggttttccttttcccccgtttccggggctaatggggacaactcccccttgccggggggcggtgttctttattataatgggggggggggggttattttttttaaatctaccccccccgggtttgggggtttttccttctctgtcccagtcccaaatagaaa

SEQ ID NO: 14988 - DNA, 484 bp, Glycine max
  misc_feature (96)..(96): n is a, c, g, or t
  misc_feature (134)..(134): n is a, c, g, or t
  misc_feature (347)..(347): n is a, c, g, or t
  misc_feature (379)..(379): n is a, c, g, or t
  misc_feature (425)..(425): n is a, c, g, or t
  Coding DNA Sequence Number=SeqID_5209
ggataaacacgcgtatagctgtacagtggactcgcaacttacaactctgccggtgtgggtgtggtgaggacgagtcggctactgtggggtgaattnactatgatatatacgcgaacaatatgaagaataccgtnagtgcgcgctgatatgtagagatgcgtgcgcctacaaggtcagagttataagcgggaaagcgtatatagcgttcatgctgaaatagcgttagtaataaataatctccgactatatctgtacctactcatattgtgagggagtctcttccctccgagtatctactatcactgcgccccccgtcatatgctagttggagagaagtgaaatagcgnccacgacgtaagcattccgagatgtagataanacatcaatataatatgatgatatatataatatcttctctcgtcgtncctcgtgtgtggggcatactcagcgctacactccatgagacagccgcaacggatctcac

SEQ ID NO: 14989 - DNA, 565 bp, Glycine max
  misc_feature (43)..(45): n is a, c, g, or t
  misc_feature (268)..(268): n is a, c, g, or t
  misc_feature (275)..(275): n is a, c, g, or t
  misc_feature (315)..(315): n is a, c, g, or t
  misc_feature (416)..(416): n is a, c, g, or t
  misc_feature (418)..(418): n is a, c, g, or t
  misc_feature (427)..(427): n is a, c, g, or t
  misc_feature (466)..(466): n is a, c, g, or t
  misc_feature (493)..(494): n is a, c, g, or t
  misc_feature (512)..(512): n is a, c, g, or t
  misc_feature (524)..(524): n is a, c, g, or t
  misc_feature (527)..(527): n is a, c, g, or t
  misc_feature (533)..(533): n is a, c, g, or t
  Coding DNA Sequence Number=SeqID_5210
gtttctctgtcatatatttctatcactcaaatatgcaggattnnntttaatctataatactaaaccgtaatatcaacacgtacactcaatcttactaccctgtccgctaaacttctatatcaccacccacccatcctctctctcttatcccctctctcctacatcctcactcgcatgtgccgccctctccctgtcgattagccggtcgcgcgcgcacatctcgccctctgttacataccaacatcacagtcgatcgctgtcaccactnacacgancatagaagacaacacaaaccactatctggtgtgggtgtgnttgtcctctcctctatctatcttttcatcctttctcactccatgcgcggagacggtgacaatataacaaaactacacatataataattatatataagatgnanactcacganctaccatacatcctctgtgcacctatactattactatcnacactatattgatatttgttttgtttnngtgtggcatgacgacgcnttgaagtatgtntgnttcgtnataggaggagagctagtgtgcagcttcaccct

SEQ ID NO: 14990 - DNA, 551 bp, Glycine max
  misc_feature (114)..(114): n is a, c, g, or t
  misc_feature (117)..(117): n is a, c, g, or t
  misc_feature (144)..(144): n is a, c, g, or t
  misc_feature (248)..(248): n is a, c, g, or t
  misc_feature (260)..(260): n is a, c, g, or t
  misc_feature (329)..(329): n is a, c, g, or t
  misc_feature (347)..(347): n is a, c, g, or t
  misc_feature (372)..(372): n is a, c, g, or t
  misc_feature (445)..(446): n is a, c, g, or t
  misc_feature (449)..(449): n is a, c, g, or t
  misc_feature (469)..(469): n is a, c, g, or t
  misc_feature (495)..(495): n is a, c, g, or t
  misc_feature (514)..(514): n is a, c, g, or t
  misc_feature (521)..(521): n is a, c, g, or t
  Coding DNA Sequence Number=SeqID_5211
tacacagagtaacggcgccacgtacgcgcgcgcacagacagagagaggacgacgggacgtgatacaaatcacaacacacgagcacaataacgccagaacacagacaagcgagcncanggcacgaaggcagcgcgaccgcggcgnccgccgcgcgcagaggcaggagagctgcactcccgcgcgcgcgccgccgcgcgcggcgccagagagcgagctgtgttcaacacctacataaaaggcgacacatngcaaaagagagngacagaagccggtgaggcagaggaggagacgcccgcacgtcacaccgagaccacgacaacaccacgacnccaccatagaaacgaagncgtccgctggcgcgcaacccaccgncgcacgccacgtcggacgcgccgacgaggcagcgacagatcaccaaagcagtgcgtggacgtagaggtggagnnacnaagcacaagctgacaaatgntagacgaggaagagacggtacaatanccggtataatacatcggcnacgcgantacataacaaacgaactccatattccaact

SEQ ID NO: 14991 - DNA, 428 bp, Glycine max
  misc_feature (389)..(389): n is a, c, g, or t
  Coding DNA Sequence Number=SeqID_5212
catctatagctacggtgtcctgctactggttcttatctctggccgccggccattgcaagtgtcggcctcgcccatgtcggagttcgagaaggcgagcctcatatcctgggcaaagcacctcgcacgtgtgagccgccttatcgatctcgtcgacccggccttgaaagatgtaaaccaggaggaggcgctgctctgcatcaccgtcgcgctcctctgcatacagaggtcccccgctcgccgaccaacaagcgaagagctgctccggttgctctccggagagggagagccgcctcacctcccgctagagttctcgccgtccccacctggtgggttccatttcaaatcccggaagaaagttcggtgagtcagttttaggttcttgcttagangcaaagggttctgttaaccacctaacttgtgccctgaga

SEQ ID NO: 14992 - DNA, 198 bp, Glycine max
  Coding DNA Sequence Number=SeqID_5213
ggcttctgagcggtgctttgtcatttgtcgtgtttgccctcgcatcctttagactgacgagactgattgtgtttgataccattactgccccttttcgccgtctatttcatgaagaacaggaagaggtaaacgaacaaggtgaggtcgaaacatatatcatcattaaagggggaggactgcggtcttgggttggagaac

SEQ ID NO: 14993 - DNA, 581 bp, Glycine max
  misc_feature (50)..(50): n is a, c, g, or t
  misc_feature (103)..(103): n is a, c, g, or t
  misc_feature (121)..(121): n is a, c, g, or t
  misc_feature (232)..(232): n is a, c, g, or t
  misc_feature (270)..(270): n is a, c, g, or t
  misc_feature (311)..(311): n is a, c, g, or t
  misc_feature (336)..(336): n is a, c, g, or t
  misc_feature (343)..(343): n is a, c, g, or t
  misc_feature (357)..(357): n is a, c, g, or t
  misc_feature (417)..(417): n is a, c, g, or t
  misc_feature (464)..(464): n is a, c, g, or t
  misc_feature (475)..(475): n is a, c, g, or t
  misc_feature (488)..(488): n is a, c, g, or t
  misc_feature (501)..(501): n is a, c, g, or t
  misc_feature (553)..(553): n is a, c, g, or t
  misc_feature (556)..(556): n is a, c, g, or t
  Coding DNA Sequence Number=SeqID_5214
gtcgcacgcgccgagtactaaagcgtcgacgctctcgccatcatctgtgncgctctaagccgtaggtcatatacgattatcgcgcgcgctagtcgcgacgccncggccgccatgtgtcatnatcagcgcgctacgcatccgtacatcatctcgcatctgctcatgcgcgctccgtagtgtcgctcgtcgctgtgtgtctgactctagcgcgtcgcgcgctcgctcgctacgnccgtgctcctcatctcggcacgctgtgatctgactcgncgtctccactctgcagcgcgacgcacgcgtactatgacgtncaacacgcaacgattcaacgagcgncgcacgntcgcgcgacacgcncacgctgcgccgctcacgagctctttcttggcgagatacgaatatcgctgtctcgctcgncatcgtatatcatccataacatcctatctttaattgagctactatgnttgcaggtcgntgctacgccctanattcgcacctgangtcgagattactatagtatctcgtacgtcgtcgactcgtagagagctcactnagncgatcgcaacgtgtgatatacatgt

SEQ ID NO: 14994 - DNA, 551 bp, Glycine max
  Coding DNA Sequence Number=SeqID_5215
aaagcaccttcagatttcttttggtctctatcgatacaaaatgacaaaaactaaaagataaaatttatgtaatggatcaaaagagatggtttttaagtgcgaggactaaactgataaagtaacaactaaatgagtaatttttccaattcaatatttgagtgatcctacctcttaattgttttatctttctataaactacaacgacaatagcctacatagcataaaaaaacatgtaaaagaataagtgttttctagtttctacctctcaatattttaactatattagacttttccctcaacatgaaagaaccctaatgcaagaggaacagtcgtgtcatataacaagcgtgttttccttttctactgaggtaaacagtgcccaatataactcacagcccaaattatgatatgctactttatattacgatatactacttcatcttaaataaatggggggggggggggtacgtagctgactcgatcggggggggggggccccggtacccaattcgccctaatagtgagtcaaattacaattgcacgggcccgtc

SEQ ID NO: 14995 - DNA, 163 bp, Glycine max
  Coding DNA Sequence Number=SeqID_5216
gaggaaggtcactctacctttcgatttgatcgtagaaattctgttgaggttgtcagtgagatctttgttgcgtttcaaatgcgtctctaagtcatggtgtgctctcatttcggatcctgaattcgccaaatcccatattgacatcactaagagtaaggctcct

SEQ ID NO: 14996 - DNA, 492 bp, Glycine max
  misc_feature (197)..(197): n is a, c, g, or t
  misc_feature (255)..(255): n is a, c, g, or t
  Coding DNA Sequence Number=SeqID_5217
tgcaagtatagcgtgggtcgtctgtgggaatctccgcttcatcatcacagtaggctcgtcactcaatcatactcgaccacagcctgcagagagtacgcgcgcgcgcgccgacagtaccggcgtgacggcacggcgaagcgacgagaagatagcagcgagcgattagaaaacaatataaatggtacttacggctttgntttatagagttatacggtgtgagtagttatgatgtgatgaattgtgagatagacatancgcaaatcgtgcccagagcacgagacagcagacaaaagaaggaaacacgacacaactaacttaacacatctcatagtcgaccctctctcacgcagctggcaacaggcacatcattgatattctctacgttcatatcttaccttactccactgtattactcctccactacatctatctcacactgcactccacagcgcacacgacgccgactctctttcctcttctggagtgagttca

SEQ ID NO: 14997 - DNA, 310 bp, Glycine max
  Coding DNA Sequence Number=SeqID_5218
gattctcggattcttcctgtgcactcactattaaatcctggaattatccttagatttgaggatgccttcaattacatttgttgttcacacagaattccttcttgagcttaccatgcgaaacaatatgaagctaataagatgatgtagcaaccagggacatccaatttgagaaaccaatctgaaacaatactaagctaatcaagcaaagtagctgcttgcatatgggatttatcctgactagaaaaagacatatctaggcttatgccgcaaagttcctttgatcccatgggatttgccatgcctatccaac

SEQ ID NO: 14998 - DNA, 510 bp, Glycine max
  misc_feature (91)..(91): n is a, c, g, or t
  Coding DNA Sequence Number=SeqID_5219
gtctggttctacagcgagcgctcatcaaaggatgtaatcgtccgtggagcgcaacgccacacacctctactcgaccctctgtgaactagtntcttgtgtatcagcatcgtggagagttggagggcgcgctgcgctcgacgatgagacgtgtgtcgcgataagagtggcaacgcagcagtcgcgcgcgatggtcgttactgtcgacagagactttgatccgcgagaggcataaagtagaacgagacggcgtccagtttgatcttttctcttatgagttgagtggcgtagtaggcttggttgtgcgtcgtcctcgtatccagacaatacactaacactcgagaacataacgtctcatgtgttgtgtcttccatcctctctgctctcttcttattgaggaaatacaaatgatcgttggttcatatcttacgtacgatgtcctctcctctgccctcttctcgttttcactgacttctatttgttatgtgaaagtgagttcagtgcgtcgcggca

SEQ ID NO: 14999 - DNA, 546 bp, Glycine max
  misc_feature (207)..(207): n is a, c, g, or t
  misc_feature (300)..(300): n is a, c, g, or t
  misc_feature (377)..(377): n is a, c, g, or t
  misc_feature (487)..(487): n is a, c, g, or t
  Coding DNA Sequence Number=SeqID_5220
atatttattacgcaggccgcacgtgttggacacactgtctctataagcgtccaccgtgaaatgtcgtgtcgtcggtcccttgacctgcgcgcagaatgcgctgctgatgtggatctccacactctacatcatattcagacaagccctgcgcataatcaccatgcggcgtctcaacgcaatcggtgtagacacgtaacagaatctacngagtagagtgaataggcgatctggcactcttctgttataatatgattgaaaggacggacatcatcagtccctctgacaccactactacgatangatagtcatgaattagatgaggaaggaggcatgtgcacggtcacgcatgagaacgcagcgatgactccgtctataantagtgtctattgtctcagctcggactatgtgtagatcgagagtagatgggacgactactatgacacgagtatgtgtatggagcgtcgctgatctcgacaagagacagtancggacgtgctgcgctgtgcggcgactgtgtcgtcgtcgatgttcgcgttgatgcatatc

SEQ ID NO: 15000 - DNA, 461 bp, Glycine max
  Coding DNA Sequence Number=SeqID_5221
accatctgaactagggaaccatgctgaaccttcaggatctttatgatggagaatataaaggtggtgctctcaaaattgattagggaaatctgtaccttgcagatctcttatctttaacccatctctctcaaaattgacgatggagagatctggctacttcatctcatttccttcaaatgactttccttgtactaaatatctaatctcaacatttctcatagcttcctcctaatgattgccaagctacctaaacttagagaactaagtttaatttattgtagcctttccgatcattttatcctttcattgacaccctctcaactcaatttttctaagttccctttccgtccttcctcttcccttcggcagcgtcacgtcttcgctggtgctcctgtgcctctccgggtctgcctgcttcgcgctccttgtgttgtccttctgtggatagcaactcttcggcc

SEQ ID NO: 15001 - DNA, 589 bp, Glycine max
  Coding DNA Sequence Number=SeqID_5222
gttcttgtcggagaatgcgagtccagagaggatgcacaccgccgacgaactcttctctgaaggaaagttgcttcctttatggcaagaaaagcactcagagaagcttaaaaacgttaacttgaagaccaacgaagaagaagagagtcgtaaagtggaagcagcgatgacgagtgacgatagtagtaagaacagagtgtgttggtttatagacgaagacccatctccacgtcctccgaaatgcacagttctttggaaagagcttttgcgtttgaagaaacagaggagctcttcgtcggtgaagtcctctctgtctccgtcatcgtccacgtcatcatctagctcgcttgaggataagagagaagggaagagaggtaagaaaggattagagaggacgagatcgtcgacgagtgtgaggataaggccgatgattcacgtccctgtttgcactcctccttctaaatcctctgtttcattgcctcctctgtttccgtcgcttaggcttaagaagaacagagcagagaaaagcaagctttaatctttttatttgacacagcttatttggttgattagttcggtttctcatgtgata

SEQ ID NO: 15002 - DNA, 582 bp, Glycine max
  misc_feature (122)..(122): n is a, c, g, or t
  misc_feature (153)..(153): n is a, c, g, or t
  misc_feature (402)..(402): n is a, c, g, or t
  misc_feature (486)..(486): n is a, c, g, or t
  Coding DNA Sequence Number=SeqID_5223
tagccacgatctttcgatgcgtatagctgatatgatcattgatatccgtgcggatggtaagaggcactagcacgtacatactactatgaagagagtagtagaacgaaacagcgcacgagcgnaggatcgcgtgcacgttcacagctcacaagnatccaatgtctgtagagaactatctgatatagagtgacattatgtagttcacaccacctcacacacacacctagctagactggtctgcgattcgtgctccagagtactctcgctggtacgtatgtcgcgcgacgtgagtctcctccgcaggacgcctataccatcgtcacaacagactagtcagtgatgctgttttatatgtgtgactgtgtctgtgttgttgctcgtcacgcgtcgcctcgtgcctgnatgccttctgcatcttgtgatcctaaacacacacgactagcttcgatcataatgcgtgcacgctctgtagcgatcgctcttcgngtgcggagtcgtggagatagagacacacgcatctcacgatctgtaatcacatccctagaccagcacacacagcaccacacgatacacaatgacact

SEQ ID NO: 15003 - DNA, 299 bp, Glycine max
  misc_feature (254)..(254): n is a, c, g, or t
  Coding DNA Sequence Number=SeqID_5224
gcctctctccgttgcagattttgtccaagatcctgctttgcacacgatgctgccttgtcaaggagtagctactgcgactgcaaattctcagctatttggattccctgctgcaaaccgctacggatatcctgcaagatcaccggttttttctaaacaagcgtttctcaagttgcgggcatcggcacttcgttgtgacaagaaaatcccccctctgagagcttgttttgatttttccgctcgtgctgtatcttcanctctcgcaaagtatgattctgtaatgggcaacaatcccttcaagc

SEQ ID NO: 15004 - DNA, 370 bp, Glycine max
  misc_feature (251)..(251): n is a, c, g, or t
  misc_feature (261)..(262): n is a, c, g, or t
  misc_feature (269)..(270): n is a, c, g, or t
  Coding DNA Sequence Number=SeqID_5225
aatggatgcatgtcatacaccacaaaggatagcttacagtgaactaacaagttgtgacatgaccacccggaagtctcaggagtacctatgctggcttcgaggtaatcatccatatgaatggttcagaagaccatgtccacgtgggtaacgtggactcttcatgtatcgtagaaggttgcgtagtgtgtccttgtcttctgtggattggggaggagagagaaggtgcttgtaaccctgtatgtaaaagaatnccaaggccannttgtggnntagttgttagggcccgttttcaacatgttagtacgcttgttcgacaggcatttacaccataatcacagaccgaataatgcttagtcttccttgtactgaa

SEQ ID NO: 15005 - DNA, 307 bp, Glycine max
  Coding DNA Sequence Number=SeqID_5226
ttacctgggtgggaaaatgctgtcccggaccaaatatttggacgggaattgctcctaatccccattcgtggacgggaatggccctcatatcccgacacctatctatgaagaaaatttaacaatcttcccttgcaaaggaaaactacctacgaatgctttacttcctttcggaccaaaaaattgaagggggggtcaacaaaaaacctttgaaaaaaattctgaacaggggcccatttggatggggttttaaaccggggggaccaaaccataaattaaaaggccgatgcctacccatttttccccgtgg

SEQ ID NO: 15006 - DNA, 552 bp, Glycine max
  misc_feature (61)..(63): n is a, c, g, or t
  misc_feature (66)..(66): n is a, c, g, or t
  misc_feature (68)..(68): n is a, c, g, or t
  misc_feature (86)..(86): n is a, c, g, or t
  misc_feature (91)..(91): n is a, c, g, or t
  misc_feature (195)..(195): n is a, c, g, or t
  misc_feature (233)..(233): n is a, c, g, or t
  misc_feature (248)..(248): n is a, c, g, or t
  misc_feature (257)..(257): n is a, c, g, or t
  misc_feature (266)..(266): n is a, c, g, or t
  misc_feature (325)..(325): n is a, c, g, or t
  misc_feature (327)..(327): n is a, c, g, or t
  misc_feature (340)..(340): n is a, c, g, or t
  misc_feature (357)..(357): n is a, c, g, or t
  misc_feature (361)..(361): n is a, c, g, or t
  misc_feature (366)..(366): n is a, c, g, or t
  misc_feature (380)..(380): n is a, c, g, or t
  misc_feature (404)..(404): n is a, c, g, or t
  misc_feature (452)..(452): n is a, c, g, or t
  misc_feature (469)..(469): n is a, c, g, or t
  misc_feature (503)..(503): n is a, c, g, or t
  misc_feature (511)..(511): n is a, c, g, or t
  misc_feature (525)..(525): n is a, c, g, or t
  Coding DNA Sequence Number=SeqID_5227
acatatagtcgctcacatcatcatctagtctacgacatctatgatgaaaggaagcgttctnnnacncncacacaatatgcacatantaccncacctacacctctgcatctgatatgtgcgctggtaaccacagcgagtgtgcgctcttgcggcgacacgatctgagtatgctccaattggactcctcgaccactnatcttcaccaccctacgtactactcatgaccacagacnatgctacgatccacngtgatgatnatatatacntcgctcgacatcacgcacgacattctgtgctgctatagtcgtcatgatgcaaacacatncnatcgatgtatgcngtcgtgtagctcgtagnagcnagtantactgtactgactnacgctatatgcgcgcaccgtgtcngcgcgacagtctaacgcagctacgtctcgtgtgtcggccgcactgcanagctgacggcatgatcntgtcgagtgatgagtgcgctatgcgatcactgcntctgacancgaccatgtgacgntcgctgcacactactgcgcatcacgtg

SEQ ID NO: 15007 - DNA, 527 bp, Glycine max
  misc_feature (81)..(81): n is a, c, g, or t
  Coding DNA Sequence Number=SeqID_5228
gggagggcccttgaatgagcaatctcccatttttaaagcctgggattaaactctaggatcactagaacaggagttagtgangcagtgtcgcccaaaggtttccaaaaacggacaggcacctttggccattttgggtctacagttatcaaagctttctataaaaaagaccagctacttcagtgacaagacagagattcaaaagtctgctactcttcttggatatgtttcacatgcggtctcccttattgcatcatatctcgatgttcctcttcgatatccactacggttgggaggttcacattcgtatattgttgatcatgcaccttcagttgacccatctatagccccaggagtaagttcttctaccccttcgagcacgagcatgaggacaatggaatttcctctgttttttgaaggccaagaaacaacaagatcggcatatgctgtattcttgttaaacaaggatgtcgaacaacttctgaaccacattggcgctgaaagtcttggcccaagacatgtactagcta

SEQ ID NO: 15008 - DNA, 589 bp, Glycine max
  misc_feature (389)..(389): n is a, c, g, or t
  misc_feature (412)..(412): n is a, c, g, or t
  misc_feature (557)..(557): n is a, c, g, or t
  Coding DNA Sequence Number=SeqID_5229
gtggttgaatttctgcgtccctctacaaacgctgatcgcaaacttgggagaggtgtggagcgtgcgaaccgcccacccacacgagatcgttctgctaagtgtatcaaaccagacgctacagccctaccacccctacactacactcactgaacacgtctcaccacgcttcgtctgtagtactctgtatactgatcgcttgcgcgagcctctcgcgttgcgctcgcgtgcgcttgtgcagcctcggtctcgtacgtctgtccctcgtttactacgtaggcggccgctcgactgaattcgaggggggtcagataggtctgtcgtctataccgtcgaggtatgttgcgtcgatgacactgcacatactctgtgtctagtatataaatctcacnacgagcccactcgaaacacctcnacctaaacatatcatcattatctcatctacgctcatattactgtcctattcacgccatcagccacactacaccgcgcgcgtggtcgtcatatcactcaggagtatctgcgcacgcgtttccgcgcgatcacgccaggaatcgcanagcgactatgatctgggtggagtccttgttct

SEQ ID NO: 15009 - DNA, 541 bp, Glycine max
  misc_feature (291)..(293): n is a, c, g, or t
  misc_feature (304)..(305): n is a, c, g, or t
  misc_feature (339)..(339): n is a, c, g, or t
  misc_feature (414)..(414): n is a, c, g, or t
  misc_feature (515)..(515): n is a, c, g, or t
  Coding DNA Sequence Number=SeqID_5230
gtgtagagcatgtgaactcgccctgcgcaggtcgcaccggcccactgccttgtacacgacggacggaaggaatatcgaacaggcacccggccgcgccgcgaccgcccgcacgccgaccacgccccgagacaccagagtaggggcagaagcggcgcatcagcgtacgcgcgcgccggcgcggtcggtcgcatgtaggtaagattcggtggggagggggcggtgccaacgcgggcagcggccccaacgagcgggaatagaaatattaaatatacgaaacaaagaaactcacannncaaacaacgannaagaacgtaaactgcgaccagccacccggcacangggcagataggagggagatataggcgagaggtgagaggacgaggaggagcggagaggagaagtgatgatagggcnaaatatatgaattcaccgttacatgataagcaagggagaggaggagatggagtggtgggagataattacattgcatctcactaaacacgacgatggatatnataatagaggataacacccacccaca

SEQ ID NO: 15010 - DNA, 398 bp, Glycine max
  Coding DNA Sequence Number=SeqID_5231
tactatggtccgataaaccttcaaaatatataggtgacccagcagtttaatcactgtctactgaaggtgccgctgtcaagtccatgcccatgcccatgttctctcctcttataagccatcttgcttcatctcgccctcgtagagcgcacgccctcaccatgagcattgtccttacatttgtctacgaagcccctctttgtgatgtggcctgcgctcgccatggcactgcacagagcagtgtccccccataaggtctcctatgtactcgcaaccgtgttccccatggtgatacagtttgtacttcttcacgcatggtgctcagccgtatgctcctcctctatcaagagccctcccacacagagggtctccccaatctagtgaattatcacctcacaata

SEQ ID NO: 15011 - DNA, 584 bp, Glycine max
  misc_feature (58)..(58): n is a, c, g, or t
  misc_feature (198)..(198): n is a, c, g, or t
  misc_feature (246)..(246): n is a, c, g, or t
  misc_feature (313)..(313): n is a, c, g, or t
  misc_feature (368)..(368): n is a, c, g, or t
  misc_feature (384)..(384): n is a, c, g, or t
  misc_feature (426)..(426): n is a, c, g, or t
  misc_feature (529)..(529): n is a, c, g, or t
  Coding DNA Sequence Number=SeqID_5232
gacaacatcgatatctaccgcgatactgatatgcgtaccgtacggcgcgtgaaacacncccgcgacgccgaccccgacccgtattctcaatatatatgtgcgtggatagagcactggacacagagactatatattcaccgcgcgcccacgctgacataggatgcgcaagtattctccgcgtcggctacccaccccacngcgactatggcgtagaattcgacagtcgtgtgcggatcgtgtacacgntagatcgtgacgcgcgcgcgcgatcgcaggcgcgcagtatgtgtgagataatcgagtcgacccgtantagcagacgacacgcgcgtgcctcaacgcggctgccgcgccgcgtgatatatttnaatatgcatacacggngcgcgcgagtccgcgcacacgatacataacagaatgagcganatgcatgcgagactcactacgcacggcgcgccatgaagtgcgatgcgcggacgatatatatactgattcgtgtcgcccttggcgtgtgcgcgcggtgatgggntatacagccacgagcattagatcatgaatagacacagagcggtcgtactcgtctt

SEQ ID NO: 15012 - DNA, 447 bp, Glycine max
  Coding DNA Sequence Number=SeqID_5233
tgcccgagggccctacaaaaggagtttggtccctttccccatcggtggaaatttccttcaggtaaggccccccttaccaggaaggggatctgggggccctcagttccgtcaatgccaatgccagaggagcagtttcgccctcaaggtcaccgataactggaacatacatgcttatcgcaaatctacgtgtgccatggatgcgagtccgctcatctcaggtcacattttcgatgtagggcgtgcacgggcagtgtagtcctgttcggtttggtcatcctcactacttagcacatcatcaggagcatcatcattgttatcaggatcttgttcagcaacttcagcaatatcacattctggaggctcatcctcatcgcccatgtcaccttcatagtaatcgtcgttctacatggctgccgccgccgagcgctccggtcagtagggtttcgt

SEQ ID NO: 15013 - DNA, 216 bp, Glycine max
  Coding DNA Sequence Number=SeqID_5234
aagcactttagaatatatgggaatctagccatcttcttcacctctgggtatctttctctctttttttttgcagcgttttgaagcctcttccgagtgtttcttactcgagatttccctctggttcattctctcaagctgcggttgattccatcttccctcttaactcaaaggttaatataacaccctttagtttatatttattcgacttttgctctt

SEQ ID NO: 15014 - DNA, 474 bp, Glycine max
  misc_feature (31)..(31): n is a, c, g, or t
  misc_feature (36)..(36): n is a, c, g, or t
  misc_feature (85)..(85): n is a, c, g, or t
  misc_feature (91)..(91): n is a, c, g, or t
  misc_feature (122)..(122): n is a, c, g, or t
  misc_feature (136)..(136): n is a, c, g, or t
  misc_feature (149)..(149): n is a, c, g, or t
  misc_feature (180)..(180): n is a, c, g, or t
  misc_feature (196)..(196): n is a, c, g, or t
  misc_feature (223)..(223): n is a, c, g, or t
  misc_feature (256)..(256): n is a, c, g, or t
  misc_feature (328)..(328): n is a, c, g, or t
  misc_feature (348)..(348): n is a, c, g, or t
  misc_feature (382)..(382): n is a, c, g, or t
  misc_feature (412)..(413): n is a, c, g, or t
  misc_feature (427)..(427): n is a, c, g, or t
  misc_feature (436)..(436): n is a, c, g, or t
  misc_feature (439)..(439): n is a, c, g, or t
  misc_feature (443)..(443): n is a, c, g, or t
  Coding DNA Sequence Number=SeqID_5235
ttgtctgatttctatactcgacgctcgcagngtcancttatcatcgctgttactatttgcttttgtcagtctaccgcgacgcgcntgactncgcagctcgacgtctagtacatgctcttatntcacgctcacttangcttagtatcgtncgctgctggccgtagacacgctcaacgcgcncgcacggtgtactgcngtatatatatgattgtatgctcatacnatgctgcccgcggctgacgcgcacactcactantcatcatcgaatcgcccacgcttcgtagtctgaatgctgtacgatgtcatgacgcatcgaactgcaggccanaccgagagatactatctatnatcacccgtcatcgctaatcacacatatgacgtnggtcgacagcgcgacgtgagcgtacaagtnnaccgtagtactgtnacgagtttntgntgtnttcatgtcttcgtacgtctgcgcgtggtgtc

SEQ ID NO: 15015 - DNA, 512 bp, Glycine max
  Coding DNA Sequence Number=SeqID_5236
gactcctgcttttttgcttttcaataattcaagcatgtaagttattgatttctttttatttttccccctttttttaagttaaggttttcgatgcttttaattactgtttgtatttgggctgttcaatactttaattgattaaattctattttctggcttcaaaaattctgcattgctctgctttctaaatttgatatattgttttttcctccaagaaactggggggaatggggaactgggggaaacacaaactgccttttgtttttttgcactggatctgttttctgttgcacctttcaggagttagctttctattggttgctatatatattatgttattaatctctataattattcttaagaaaaactattgtattcaagaatttattttccacacatgttgaactctgggatttgtgttgctatatctagaaattaccatgatgtctgttatttttaaaatgcattgcggcaacaaagatttgtdcgagaagtcacaatacagtacaatc

SEQ ID NO: 15016 - DNA, 406 bp, Glycine max
  misc_feature (245)..(245): n is a, c, g, or t
  Coding DNA Sequence Number=SeqID_5237
gtccaccaacggaggtacctatagccctccctcccccccaggatcccagtggccctgccactgagggccattggatagctaaactagttgcttgtgggggccggcatcccctgccaatagtagaatggaaatccaatgaatcttccaattgactcaaattttaaataaccccgaccctgcaaagtggatgaggccaatgtctgatttggaactccattcaggggcgggaatttcactcgttctgncatgatatgatcccccaccacggcatccatccgtattaggttttacaccccgatcatcacaggggtctaggggtctgggtccgcgatcgtgtccggtgtcggtacccggcccttcatagattacattatatcttcagatattttggccccattaggatcga

SEQ ID NO: 15017 - DNA, 485 bp, Glycine max
  misc_feature (174)..(174): n is a, c, g, or t
  misc_feature (366)..(366): n is a, c, g, or t
  Coding DNA Sequence Number=SeqID_5238
gttgtagcatggtctatcagtgtgatagagatgagtagacgtgatacacagtcaattataaacgtgctgcatgataggtagcgaggagctcttatggaaagcgcacatagcgatatagatgcattatcgcattgtatattcttcgacttgagtaggagcctactcttatccatnctagaattctctttagtgtaatatagaagtagtaatagaacgtatatcagcatattaagtaagagagcgtgagtgctctcactattgaactttaatccagttctatctaagtctgggaatgaaccctagtgataaaaacacatgcgcgggctccatgcccacccagatatcaacggcataggaataggatgnagaacgatcctcctcccacaagacgatgaaaatcttctggcggggtggagggtggttatcttgatcgtatgtctccggagtggtggggccgtcgtttccctccttgctgttttgttctt

SEQ ID NO: 15018 - DNA, 537 bp, Glycine max
  misc_feature (440)..(440): n is a, c, g, or t
  Coding DNA Sequence Number=SeqID_5239
tggttgtacgacacggatctgagaagaacaatgagcagaggatcgcacaggaataacacacggcgggccagacgcaaggctaaaaccgtgggcacagataccccacgcgatatgaacaatcacaactgtgcgagtagccgtcagactcgggacgacgacggccgcgaggtgagacgtacagtagtggtatactatcggtatcgcgcgtcatacagcgaggataggtcgacacatgtgcgtctacacaatgcgcgaggggcgtaccagaagctactaaataatgcaaggtcgaaatagtcactactcgcacaatccataaccaccaccaagcttccattatttgatcgtttatacattctccgccgcatgcccatatccctcttatttatcggcatgactgtgacagagcaacgctcgtgtagggtaattatttcgtatgnctttactctatcaggaggggagagggtcgttctcatctttccttcataaaaaaaagaaaaagagaacgacgctagataagaacaccgacacctccta

SEQ ID NO: 15019 - DNA, 250 bp, Glycine max
  misc_feature (63)..(67): n is a, c, g, or t
  misc_feature (78)..(82): n is a, c, g, or t
  misc_feature (93)..(97): n is a, c, g, or t
  misc_feature (203)..(207): n is a, c, g, or t
  Coding DNA Sequence Number=SeqID_5240
tactcctttaatgttgagggaaatggagctgggagttaaacaagttcttgtgaaacttggggnnnnnggatccgcgcnnnnngtagaaggagnnnnnccaattcagcagcctgccatacttgctaaaacagttgtcgatacaactggtgctggtgatacttttactgctgcttttgctgtggccttggttgagggaaagtccnnnnnggaatgcctcagatttgctggtgtgtatggtggaatgcaactc

SEQ ID NO: 15020 - DNA, 413 bp, Glycine max
  misc_feature (30)..(30): n is a, c, g, or t
  misc_feature (246)..(246): n is a, c, g, or t
  misc_feature (251)..(251): n is a, c, g, or t
  misc_feature (257)..(257): n is a, c, g, or t
  misc_feature (263)..(263): n is a, c, g, or t
  misc_feature (318)..(318): n is a, c, g, or t
  Coding DNA Sequence Number=SeqID_5241
gtgtaaatccaacttcccaaacataaaaanaaatgatgtaccctaagaagacccctaagcaagctaaagcagatcaagaagctaagaagcttatcagccaacaacaaagagaacaactcaaggaaatggtcgctggaaagttccaagccaaatatcctaataaagatcctcaagctctccaagaaaaagtcgataacttctttgaaaataatggccaccaaacactcacctcagaagcccttaganaactngacaanaatatngcctatagcgaaaaggataaaagaagtgctataggccaagatagagatgatattncagttaagtcaggagtttcaaaaatgtcaggtgcgactgacttcgctcctctcgataagactgaaagatcaggatctaagaagggcaccacagtt

SEQ ID NO: 15021 - DNA, 449 bp, Glycine max
  misc_feature (73)..(73): n is a, c, g, or t
  misc_feature (288)..(288): n is a, c, g, or t
  misc_feature (357)..(357): n is a, c, g, or t
  misc_feature (359)..(359): n is a, c, g, or t
  Coding DNA Sequence Number=SeqID_5242
tatataaatcctgccttcacactacgatccgcgtgctgcgcgtattcatcatctacattgcccttccgctctnaccatgaagtctcctcttctctgccctcgtcttgattcctcacacatcgcgtccactctaacctgatactactcctcctcttccgcctcaattctccgcctctctgggcgtatatgtgttctactactgcgcgtgcctgtcgcgcgcggtcatagtgctatactctctctgtgctatcatattcctctctgtgtgtctctcggactctaccacanacatcaacgctgtctgtggagatgatagcttcctctgctttcgatctccgtgctgcgagccatacacgntntgtgcgtcctatctctctcttgctctgtttgctctgttataccgctgtgctgtgtctatcttatcatccatcattggacgtgttctatgt

SEQ ID NO: 15022 - DNA, 583 bp, Glycine max
  Coding DNA Sequence Number=SeqID_5243
gttcatactcctagttgtgggtcttgtagccctagagcaaacccagcaagcacaggcatcccactgttgttgccatctagactcggtccctacctattttcagtgccgcgaaaaatctgacagcaccgtctctgagtgttgcggtgcttctgctggctatatatcaaacgacgctggatttgagtgcaagtctggttatattgatatagagactgcactgcaagccaccaactactgcaagattgggtgcacggcttccttgtgcaacaaattaactccatctgggaaaggtgccatggaacactgcaccagtggatgccmcgatytgtgcaccaagaacaacgcggaaattgcacaagtcatcmcggcttaactagttatgccaaggagctgcatytaacaagcccgccaaggagtgtttatgttgccttcaataatttgtgccaagtccaataaggatcatgagctgtatgatgcatcttcctgcaaggatgtatagtgctcgatcatcgtttcttgttaaaaaatttatgttgtatccttggtatatggcatgatgacgccacgcttttagtgaatcttg

SEQ ID NO: 15023 - DNA, 375 bp, Glycine max
  Coding DNA Sequence Number=SeqID_5244
agatcgattcgcgattccgtaaccatgagctccttcaatggaagcagcaatatcgacaaccttctactccaaaccctacttggacgcctccagattcgtccccctaactctcctcctcttctctcacaatccctagaggacctcctcttcaaacccgacgacagcgacggagatgatcggagcagtctcgatggggaagaagctaggctggagaaggagctaatcagcgtcatcgtctcgggtcgaatcgatcctctgaagccgaattcagggcaggcggtgacggttaacgagcaccacatctgcgttgggtttcatgaagatgaggaatcggattatcgtgtgtgggagtggcacggacatatcatgcttttt

SEQ ID NO: 15024 - DNA, 385 bp, Glycine max
  misc_feature (332)..(332): n is a, c, g, or t
  Coding DNA Sequence Number=SeqID_5245
agagcgcgagcgcagctggtggttgtcccgcgcacactcggttcccccccattcgacaattttttagttgaggggcggcgccatcaccattctcagttcttttgggacttccctgtcggggcccgagtatgatccgtcattcaagtctttcaaagggggtctttgggccccttccatctgatgttgcaatggagctcagtaatgtccttaacaatctgaatggtacaaaagaatccatcaaaggtgcaaaactttggttcatgcagagatctccatttgcaccagccctagcagaggctcttagagatagggtcctttgcattggatgaagntgagagacaattacccataatataccttggccatgacataatttttgacagat

SEQ ID NO: 15025 - DNA, 320 bp, Glycine max
  Coding DNA Sequence Number=SeqID_5246
tctggaagaccaggtaagttttgtttaatctccgatgatcatggtttttccataattaattaattggatcgattagattgcgccgaaagcgtgtgggcacacgcgcgggaggaaaagcgttgacgaggtgcaaggcttatggggatgctggggccgatgttctttttatagacgcactcgcttccgttcaaagaatgaaagctctttgtggcctttttcccatctttcgcaacttcgcaatatgcttgaagggaggaggcaaacggctatactttagtcttcagaacttcgagaagtgggttataaactgcttatgatcc

SEQ ID NO: 15026 - DNA, 535 bp, Glycine max
  misc_feature (27)..(27): n is a, c, g, or t
  misc_feature (54)..(54): n is a, c, g, or t
  misc_feature (82)..(83): n is a, c, g, or t
  misc_feature (89)..(89): n is a, c, g, or t
  misc_feature (109)..(110): n is a, c, g, or t
  misc_feature (125)..(125): n is a, c, g, or t
  misc_feature (163)..(163): n is a, c, g, or t
  misc_feature (170)..(170): n is a, c, g, or t
  misc_feature (174)..(174): n is a, c, g, or t
  misc_feature (208)..(208): n is a, c, g, or t
  misc_feature (223)..(223): n is a, c, g, or t
  misc_feature (253)..(254): n is a, c, g, or t
  misc_feature (257)..(257): n is a, c, g, or t
  misc_feature (268)..(268): n is a, c, g, or t
  misc_feature (281)..(281): n is a, c, g, or t
  misc_feature (328)..(328): n is a, c, g, or t
  misc_feature (331)..(331): n is a, c, g, or t
  misc_feature (334)..(334): n is a, c, g, or t
  misc_feature (339)..(339): n is a, c, g, or t
  misc_feature (344)..(344): n is a, c, g, or t
  misc_feature (356)..(356): n is a, c, g, or t
  misc_feature (359)..(359): n is a, c, g, or t
  misc_feature (361)..(362): n is a, c, g, or t
  misc_feature (374)..(374): n is a, c, g, or t
  misc_feature (380)..(380): n is a, c, g, or t
  misc_feature (400)..(400): n is a, c, g, or t
  misc_feature (411)..(411): n is a, c, g, or t
  misc_feature (413)..(413): n is a, c, g, or t
  misc_feature (450)..(450): n is a, c, g, or t
  misc_feature (459)..(459): n is a, c, g, or t
  misc_feature (481)..(481): n is a, c, g, or t
  misc_feature (495)..(496): n is a, c, g, or t
  misc_feature (510)..(510): n is a, c, g, or t
  Coding DNA Sequence Number=SeqID_5247
atcatgctatgctttctcatagcaagntttactcgatctcgcgcatcgtctcgntcgaatcatcaatggtccgcgtacgggnncatcancatctgagacgcagacgacnnagacttctccccgcntacgtgtatattcatcacattcgacatcatacgagcangtattanctanaaagacgcccgaaatgaaccaactatactattcnatatgatgccgtgcncacttcaactcctcagtgcacatgcgcatnnacnacgcatgatgncgatacaaacgtntgagtgtgtatcgctactaagctcaagtcctgcatcgcaatgatcgnacnatncatcnccgtnacgagtgagcgncgncnncaactaaatgcngctctnctgctgtttactactgcagncgctgtcgatnantcatgatgacgtccacgtatgatctgtactacaactncagcctgcngacgtcgatgatgcacatcgantcatccacgtattnntcatatcatcactngatagagtcgctgccggtaactgac

SEQ ID NO: 15027 - DNA, 568 bp, Glycine max
  misc_feature (28)..(28): n is a, c, g, or t
  misc_feature (125)..(125): n is a, c, g, or t
  misc_feature (129)..(129): n is a, c, g, or t
  misc_feature (351)..(351): n is a, c, g, or t
  misc_feature (380)..(380): n is a, c, g, or t
  misc_feature (439)..(439): n is a, c, g, or t
  misc_feature (458)..(458): n is a, c, g, or t
  Coding DNA Sequence Number=SeqID_5248
gcacgcgcaagtgagtcgtacacatacngaggagtgacgcacagagagacgagagaacatacgcatccgcatcgaggatagagtgaccagacgtgaaagagagaggcgagagcactacgcacgancatnacgaagagacatgcaacgacgacacacacgcaccacggccgacgcgtgagagatggaggacgcccgacacagtgcaactgcacgcctcggtgagcacggccccacaacccacgtgttgcgccgccgccggacgacgaggtatgcaaccacagagcacgacggcacagcgagccccgactccgcgccgacgcgcaaggtgatgtagtgtacggcacaataganacgaggtgaccgctacaacgagataaatngtgaagagcagagagaagacgagtgtgtagtgacaggactgagtgacaagtgaacgcanagcaccctgacagcgagangacaggtaacacgccatcgacatgaggatgtgccactcaagagcatacagaccaacgtacacagaacgacagcacgcacaacaacacgagcgaggtcacagagcagcccg

SEQ ID NO: 15028 - DNA, 481 bp, Glycine max
  misc_feature (65)..(65): n is a, c, g, or t
  misc_feature (232)..(232): n is a, c, g, or t
  misc_feature (411)..(411): n is a, c, g, or t
  Coding DNA Sequence Number=SeqID_5249
cgtcgtctcatatgctttgacatataggagctgagtctctagtacgtatattgtgcatgtgagtngagacgcggtaccgtgcatcgtatcatgagggtgctcgttgacctacgcgatcatcgcacgcagtcgtagcgtcggcgtcgacggcacggagtatctaacatctagcgctgttgcgaatctggctgatggagcgtcgcatggagagcatggcagacaagagcggcgngcgcacgtgctcacgtatagacgtcgccctgtgcatcatcggcgccgagagggcggtgcgaagcgcgctgcgagcatcgctcgcgcggaggctgaggcacgactatgcgtcgagtagtcagccgctacctactgatcctacagtctctcgagactacatgatatgacgatagagagagngtttacgacacgctatatatgctctcatgcacatagtgacaagatatcagacagtgcgatacctacgtcc

SEQ ID NO: 15029 - DNA, 449 bp, Glycine max
  Coding DNA Sequence Number=SeqID_5250
aaagctgaacacatctgcgctacctgcgactccattgtcatcaatgccaacactaacgttgaagttgaaaatctccttgccgtcaacactgatgagttctgcgacggttgcgacagcattgacttggatatcggaatcgatgataatgttgctcttaacgttgacctccatgttgatgttgccaacaactgccctgactgtgaaactcctcctcctactgaagactgtgaagaaggaaactgtggacttgatgttgtcgtcgataccgatgtcaacctttcccacaagaacaagttcagagtcaacctccacaagggttctcaaactcaatcctccactagcggtggtctcggagctgctccttcattcaccttccctaactaaggttcataaaaaatatgtactttaaccattaattatgtttatactttatcttgttccctcatgaa

SEQ ID NO: 15030 - DNA, 523 bp, Glycine max
  misc_feature (243)..(243): n is a, c, g, or t
  misc_feature (457)..(460): n is a, c, g, or t
  Coding DNA Sequence Number=SeqID_5251
tacatgcgaggagagtcacattcatatatatataggctatctgttatacgagagctatacgagagcagagcatgtcgcatatgaatcgctgcgtcgcaagtagaggtggagattgtgtgtggtgagctatatcgaaagtagagagccaacaaacacaaatagatccaacagagcgccgaatacgatatacaacaacacacacaaacataaacaataatagaccgcgcgcgtcgtcgagacggncggcgaacgagccacgatacgagccagatagatgtgcgagtattgacatcgactcacacactcgtgagcaacccatagaagggacggacgtttatccgagtaatagtataatatctcacactccaacaacggtgttcgcggtatattaatatatatctcgtgatagctgggtgcagcatgacgggcggtttgtgggaagggaggaaggggcttnnnncttcggtggttgttttccctacttctctttctcacttcatgctctccagctttggtgtttgca

SEQ ID NO: 15031 - DNA, 506 bp, Glycine max
  Coding DNA Sequence Number=SeqID_5252
aaatgactccatagcctgggaagaatgagaagctggctcaactatgtcctttacttctgcttactattcattattcatacaatcggtgtataccaagcatgatactcaaggtagaatttaaatgatatatatgaaatctttaacctattaaaaaggaaactaatctctcagaatttacagcaaagaaagctatccttccaccaccgttgcttccggtagtgactcctgtcggctttcgccatcaagaccgggctgctattccattcagactgaattattgggaatgcaaaggatcgtgtgctggtggagcaacagttggatcgaatatctatgctgcaataataagtattatgacaagtattgtttatcagacatgacattgactagtttgattacacaatattctgcagggagctgtgacgaacagtggcagtgacagcctgatcatccgtcatcccttcgaccggcttccttgtttgttggatttcatcacacttacacactac

SEQ ID NO: 15032 - DNA, 474 bp, Glycine max
  Coding DNA Sequence Number=SeqID_5253
tatcaattagatacatgccctgctttatatagactcgttttctgctactaacaattctaatggattcttgtggcatattgccttggagaaaaaaacaaaaacaaaaggaatatgcttcctaatggactggtgccacctcagcagacaaagggggaattgctacgttgctgcaattgctgagcaccactcttgccagctactatttttccacaaaatccttgaggtattgaggtttaacaatttccctttttggccttgaagctttttccttgctcgaccctgtttctagcttgaattctgcttcctgagtagtttctgtgtttggtcctatttcttgctcaccatgccctcgtgccgaattcgcacgagggttatgaatgttgttccctttgatgcaaaaagcaacaatcttggcattatctacgaacgaggccttataggaacttacatggattggtgtgagcccttttcgac

SEQ ID NO: 15033 - DNA, 534 bp, Glycine max
  misc_feature (70)..(70): n is a, c, g, or t
  misc_feature (78)..(78): n is a, c, g, or t
  misc_feature (93)..(93): n is a, c, g, or t
  misc_feature (280)..(280): n is a, c, g, or t
  misc_feature (283)..(283): n is a, c, g, or t
  misc_feature (285)..(285): n is a, c, g, or t
  misc_feature (290)..(290): n is a, c, g, or t
  misc_feature (370)..(370): n is a, c, g, or t
  misc_feature (431)..(431): n is a, c, g, or t
  Coding DNA Sequence Number=SeqID_5254
aacgcgatattgtgtgattccagacacatgagatcgacagaagacatctgtgagatagatagtagacgtntgagtganatagcgtgcagagcntaaccattagcttacacaccaattcatcatcacccacgacaataataacgcgcagcgccagacacgaagagatgacagcaaaacataagcgcgagagtgtcagtagagatagaggagaggttgagcagactatctgaagcgacagcaggatgagacttggcgcagggtgtgtgggggacggtgtggntgntntggancgatcatgcggtgagatggttttagagtgagaggtagtccagcactctcttgtgggcgtgggcgccgcggcgccgcccgncaatcgtgcgtgtgtacacctccaatccatacaataactctcgcagcggaggatgcgacgntgtaagataggtcgtaattcgagatttgctgagggagcctcgccatcttgtagtattatttataatatgtatttggagtgataggtcggtgtgttgccgctct

SEQ ID NO: 15034 - DNA, 548 bp, Glycine max
  Coding DNA Sequence Number=SeqID_5255
tcagattaccgttcttcaatggcgttatcaagtatgtttatgtttaggagtaccttcggactcgggacaaagatgctggtcgtttctctgcatcatgtgcatctatacaaggctcaagaagatctcatataggttgcaaaaaatcttggtgttaatctcacaatgttccattggcagatgatgatctgtgtggaaaagaagatgtcccacttattttgctatagtatctcagccaccggatactattcatggcttcactttcggttaacattgcaaggtgaatttattgaacagtcatttggataggatcacttgtgctttataacacttcatcgcttcacttgctgcttcactttgagcattggaatgcacccttctgtggcaccaaaaccagattggcgtgccctcatggattatatggcttgtattgctacagatgattttcgcttcctttgttttccaggaacccatttgttgattcttcgatgtcgaacctgactggatatggaagatgaacttggcagtcgtccgtcaatactaatgccaag

SEQ ID NO: 15035 - DNA, 592 bp, Glycine max
  misc_feature (112)..(112): n is a, c, g, or t
  misc_feature (195)..(195): n is a, c, g, or t
  misc_feature (347)..(347): n is a, c, g, or t
  misc_feature (385)..(385): n is a, c, g, or t
  misc_feature (453)..(453): n is a, c, g, or t
  misc_feature (456)..(456): n is a, c, g, or t
  misc_feature (460)..(460): n is a, c, g, or t
  misc_feature (462)..(462): n is a, c, g, or t
  Coding DNA Sequence Number=SeqID_5256
acgacagagaagaccagacgccactgcagctatagatggtcacgattctactgcttgttgatgtttcttatttcgctcgcatctattgttatattttatagattgtattaantataggcgttgtctcttaatatttatttatatagcttcatcatttatgcgagcaacgcttgtcgataatattcggagcgttgntgtgtcggggtcggggcgggtcggtggtggtggtgcgctgcagctatttctcgtcgtgtctttgtgtctggcgcgtgtattgtggagttcgatgttgcgcggcgggtcgagggcgtggtcgtcttgatctattatgactatcaagccagctnctccaggtgtctattcactgtcgtctaccattttcatnctcttgctgtgggtgtgtcggtgtcttgtatgtgatgatatttcatcgatttttgatgggtattgagnatntaananttggcgcgcctgccgcggctcaacccgccgcccgcgccgcgcccccaccccacccgagcacgccatgcccagaaatcaaaccccacacgccgaccccgtgaggaagagcggcacgacgagaggacacatc

SEQ ID NO: 15036 - DNA, 551 bp, Glycine max
  Coding DNA Sequence Number=SeqID_5257
acaacctcctatcattcctcaaaagctttgaatttcactttagccaacgcagactttgatgttcctgccgaagtaacagctaataatgcaccaggagacaaaattgaacacacagcttctcttgtagctaaaagaaaggattttagccagggagctattagcaatgtttttaactctggagacagtattgaatttcaagaaagcggtttgaattttatacagaataagaaaccgtccattccatctttagagcctgtgtcaggtccgcttagagagagcaatgggtataaaaaatcaaattttcatcgaggaaggactcaagttaatgattatgaggaaaatctcagcgaaagttcaatctgtgaatggaaagacggtaagaatatatcacaaatgttaaatcaacagcatttcagcgttatgagaaaacaagatttaggcacctgaaacgttttttaagggcttttttgtaatagtttattttctatgatacataaattctctttcatcattttttaatattgtaacctcttaggtagtttattgttgct

SEQ ID NO: 15037 - DNA, 417 bp, Glycine max
  misc_feature (81)..(81): n is a, c, g, or t
  misc_feature (232)..(232): n is a, c, g, or t
  Coding DNA Sequence Number=SeqID_5258
tagctgtatatctgtctgcgcggtatcgcctctgcgccgactaatcggttggctgacgagatcggtagaggatgctctcantagtcacgatgtatcgagccttcgcacttgatagcatcccctcgagctacatgaaggcatggagctggggagaatcagcaaagagtgattgtgatcaagttctgtcttctatcgtagtctcgttatagcgtacgagcgagcggatagtganggcgacgcgcgacagtcggcggtagggttcctcacgctaacgggttatgtctgctctgctgtgtctttcgtatgatagtgcagtgatagaatagtcgataacatataatattacgccatcgcagacacatacaacacatagctcgttggtcatgtcgatgtgtgtggcctatattctctgatttt

SEQ ID NO: 15038 - DNA, 506 bp, Glycine max
  misc_feature (90)..(90): n is a, c, g, or t
  misc_feature (161)..(161): n is a, c, g, or t
  misc_feature (164)..(164): n is a, c, g, or t
  misc_feature (181)..(181): n is a, c, g, or t
  misc_feature (194)..(194): n is a, c, g, or t
  Coding DNA Sequence Number=SeqID_5259
atcctcagatcagcgcagcggaagatcgaatcaatctaggtttggcgagagccgagccgaggggagggggaggagatgtgaagccatggncggatgccccgcgaagatgagttccgatgccccgcgagtgggaccgcacgagcagtgctggatgggctggncgnagcgccaaacaactggncggagcatgctgnagcagctcgaaaaacatttgagagactgcaattgccatttcaaaggttgagcctgtcacatttgcgcaagtgcaaacagtatcctcgtgtcacgagctgatggaccacaaccgacctcagggtgtcgagatgacatgatgatccctgtccgtgatactggcccacttttatacccgggaggggtctgattaggatcccaaagaaacatagggggatgactggaattacccatgggaggactcggggggtcctttataatggagcctgaacaaacttggccaaaaatagtgaatggaaggatcccagttcccc

SEQ ID NO: 15039 - DNA, 513 bp, Glycine max
  Coding DNA Sequence Number=SeqID_5260
ggtccaacattgtgatctcgcaccacgcataccacgtagcagcgcacatcaacagatcgaaaagattgttcaagagtgctaaccagctgcttcagcagacagcaacgccgtcgctagcaagcaatttcccttcccactgattatccttttcatctcctaccaacgcctggtatgtgcgtaacctgaaagttactcgacgtggtcgaccttctgcttctcgcttgcgcccttgatcataccagacagatcaacaataggtagggagaaggggaagtcgacgctcgcaagcatgattgcaaagaagatgtaccatccaagtatgcacgtgacgaacgtgaatgcgccggctgcttcttgacacttggatgcgattcctgcgttgccctgcgcggtgtggataaacgtaccggcaaggaggccgaaagctgggacgagagtgaagaagatgaggaagaagaccaggttggttcgcatcgagcagacgaggtacacgagacagagtatgcccatgca

SEQ ID NO: 15040 - DNA, 481 bp, Glycine max
  Coding DNA Sequence Number=SeqID_5261
gtagtatcgaatctattgccgccgcagtcttgtatattgctagtagaatgtgctcagtgccattgagacctcacgatattgaaaacactacaggagtgcccattaaagatattaagggcgcgtataaaggagttaaaaatcatgtcaactatatcccgcctttggatcctcccagatactgttcaaatttctgtgctaaattgggtcttccaaatgaagtttcaaatgccgcttataaaatcgctgaagctattaaacaaaagagattgctcgatggtagaaaccctcgtactatcgcctctgcagccatatatattgcaatccaactctctcctgattgtaaatgctccttgaaggacatctctcagcattcaaagattgcagaaaataccatcaaaaactcttataaagatctttatgctcacagagctgatattgtccctgaatggaagggaagattagctttagatactcttcacag

SEQ ID NO: 15041 - DNA, 382 bp, Glycine max
  Coding DNA Sequence Number=SeqID_5262
ttcattttcatctggttcaacccaaacagtgagagatcaagctccttggatgacggcaacttacaaatctaagcccataatcaatcatattttccgtcagcaagataagaggccaccgaccgtcgtatctgatgcttttgctttgatagtcttagttcctgtcttgattctgttcgtgttatggattaagcttcgagtgaatctctctggtttctcatttagcctgagtggattaatctttcatcttggtttgggttcaatattcgccttatttacttatttctggcttgaactggacatgttttcaactatcaaatatttgttgggacttggtctggtcacatttttatccggtcacgtctcctgagcgactggcaataaa

SEQ ID NO: 15042 - DNA, 319 bp, Glycine max
  Coding DNA Sequence Number=SeqID_5263
gtttctcgagaaactaaattaccataactttgtcatgcatgaggaaactacagaccattgaatcaacgacgtttgctttaaatgaaacatcaaattatgaaaaatatacggacagaaatccataattaatattggttattcatatttatcgtacattgcaattgtattagtgtaaaggcacgaaagaatatattcctgaggaaacacatatataattcacttgctctagatattatggagctccaaaacttatattatgagctactgaatacacagttactattgatatgcgttacgtaggttgtgttttagatgaact

SEQ ID NO: 15043 - DNA, 569 bp, Glycine max
  misc_feature (116)..(116): n is a, c, g, or t
  misc_feature (153)..(153): n is a, c, g, or t
  misc_feature (169)..(169): n is a, c, g, or t
  misc_feature (175)..(175): n is a, c, g, or t
  misc_feature (184)..(184): n is a, c, g, or t
  misc_feature (329)..(329): n is a, c, g, or t
  misc_feature (404)..(404): n is a, c, g, or t
  misc_feature (458)..(458): n is a, c, g, or t
  misc_feature (536)..(536): n is a, c, g, or t
  misc_feature (544)..(544): n is a, c, g, or t
  Coding DNA Sequence Number=SeqID_5264
gagtgctcatcgacgactcgcagtacagcgacaatctatctcgcgaactattcatgattgactcgtacgtgaccttaatatactatcatcggccatgtacgatcatctggtcgatngttcgtcgcgcagctacatatctgtatgtgagtgtancgtactacgcatacgntgcttnccgtagttnatattccgacactatgaatgatgcttagactcgtgcgccatgggtgtacggggtgcgagtactgaacgaaggtgacgcactgcactgcactgtactagacgtactgacaatcgcctcacttaccgcacgctacatagcgtacacngaatgtacgcactacgacgcaactgttagcagatgtatgatgagaggatacgctcgagttgacgaggagcgcgangaagactgtgtaagagtgcacattcatgtctgcgagcgacgctgctaggcgtancgtgatgtgcgcagactcgaggcagggtcatgcttcgactgtctattgtgagagagcgtagcaggatagatgcccganagatctcntatcgctcgtcgtaactgagacatg

SEQ ID NO: 15044 - DNA, 544 bp, Glycine max
  Coding DNA Sequence Number=SeqID_5265
aggtcctcatcgtcagggtctgtgaactggcttgcgtttgtgttggcgccaaggagagtcgtatccttggtagcaggtttgccatggttcgagactgttgaaatagaagctccggcaggtggtgaggctccggcgccaatgatgacaccaaatgagatcactgagccttctgatatgatgctcttcttgcccagcgcggcggcatcggcaattattgagtttgttacgctcgtgccttcgtcaatggagacgtcttcccagatgaatgcattttgaagcacaacattggagccgatggtacagttcctcccaatgatgcagttcgtaattctactgccggggccgatagaggtcttgcttccaacgatggaattcgacagactggcactagatgcctgtgaaacgtccttctcaagcacgactcctttgggatgtcgcttatatgcttgcccctttaccaagttgttctctggcaggaatgggaacgtccaccgacctaggatatcacggctgatcgagtcgtacatttggaggttgctggccc

SEQ ID NO: 15045 - DNA, 530 bp, Glycine max
  misc_feature (378)..(378): n is a, c, g, or t
  misc_feature (420)..(420): n is a, c, g, or t
  misc_feature (470)..(470): n is a, c, g, or t
  misc_feature (488)..(488): n is a, c, g, or t
  misc_feature (492)..(492): n is a, c, g, or t
  Coding DNA Sequence Number=SeqID_5266
gacatcgttctttgactgtctctgcctctgtgttgttggtcgatcgcttgtctgtatgagcgtgtctttgctcttgacgtgtcctaaatcggcgcgtgttcatggtctattatcgtagacggagtgtagatatatcgcatctcatcctctcgactctatatatagattatcattcgtaacatcggtaatacgttcagctaaatactctgtgtattcaccatcgtacgtctgcccgcgcgtgcgctctccgctctttctactcgcgctatctctctcttcctctctcttcgacccccgtctacctcgcgcgtcgtctgctctcgtcagacgttatctctctcgaactccgctgcacctcgcactcgtcactctctgctnacctccacgatatcgtcactctgtactgtgacttacgatgtntgtcatctcctgtgtctatcctcgctcacgtcgcgacgtagagtctgagnaacgtcgcgcgacggagnatcngagtatgacttctgctcacacatgactgtatctactcg

SEQ ID NO: 15046 - DNA, 565 bp, Glycine max
  misc_feature (77)..(77): n is a, c, g, or t
  misc_feature (98)..(98): n is a, c, g, or t
  misc_feature (100)..(100): n is a, c, g, or t
  misc_feature (157)..(157): n is a, c, g, or t
  misc_feature (193)..(193): n is a, c, g, or t
  misc_feature (210)..(210): n is a, c, g, or t
  misc_feature (251)..(251): n is a, c, g, or t
  misc_feature (260)..(260): n is a, c, g, or t
  misc_feature (300)..(300): n is a, c, g, or t
  misc_feature (303)..(303): n is a, c, g, or t
  misc_feature (350)..(350): n is a, c, g, or t
  misc_feature (354)..(354): n is a, c, g, or t
  misc_feature (356)..(356): n is a, c, g, or t
  misc_feature (397)..(397): n is a, c, g, or t
  misc_feature (420)..(420): n is a, c, g, or t
  misc_feature (454)..(454): n is a, c, g, or t
  misc_feature (458)..(458): n is a, c, g, or t
  misc_feature (475)..(475): n is a, c, g, or t
  misc_feature (478)..(478): n is a, c, g, or t
  misc_feature (505)..(505): n is a, c, g, or t
  misc_feature (530)..(530): n is a, c, g, or t
  Coding DNA Sequence Number=SeqID_5267
agtgctcacactcgcgatagtatatatacattacatgatatacatgaaacagtaactcgtatctacgcgagatacanatttatattagagctcctgtnancattatccctgtgtcgtcggtccgtgtggagtctttgatctcattatctactagctntgccgcaatatctacatatagtttatacatgtgatntctttcattctatgcgntgatcttcgattatgatatggactctatgtaagtcaccaanatggatctnatgcgtcacgacgctccttatcatcctcgagactgtgacncanatgcaacatcagccagaccgtgctcgcggacacatctatacttgatnatgntnactacatttcatgtatattggctctcacacacatcagtacncactgtcgttacgtacgacgtcnactcgacgtactcactatactatcatagactgcntcancatacactcactgtgcncgncctttcgcacaccactacgtctcgcgngttgactctcaatctagccagacgntatgctagctgcacactgtgatatctgtcgtcgcg

SEQ ID NO: 15047 - DNA, 581 bp, Glycine max
  misc_feature (237)..(237): n is a, c, g, or t
  misc_feature (301)..(301): n is a, c, g, or t
  misc_feature (395)..(395): n is a, c, g, or t
  misc_feature (435)..(435): n is a, c, g, or t
  misc_feature (505)..(505): n is a, c, g, or t
  misc_feature (525)..(525): n is a, c, g, or t
  misc_feature (556)..(556): n is a, c, g, or t
  Coding DNA Sequence Number=SeqID_5268
aacacgtaggccctcgtgcgtagaggagaggtacgcgccgctagattgctgcgcacgtacatactgttccatttcgcctaacgtgagaatcctacggtgtacaatacacaggtccagcacgccatcacacggttatttttcgacgtctgtatactatgctcagtatctgtgtgattgcactactctcctgtcaccgcctcggcctgctcatcctccctctccaccctcctccccagncgacgccgcaccaccctcactcactctgaggcgtgcaggactcttgagagcggaacatggtganagagagagtgtgatgcatcgagaacggacgtatattatatatgtgaactaataacggcagagagtagcagcacgagagagagcgctctcagtgncaccgaggatgtagaggaacgtataccgatcacgtcgcangccagccttgtaggtacagcatatgacgaacaggcaggagcaccgcacgaaagagaacgacagcggagcngagacctcgtcacgtcttcnctgctctcctatcctactctctaccatgcanactatacgccgatacacgatcatat

SEQ ID NO: 15048 - DNA, 505 bp, Glycine max
  Coding DNA Sequence Number=SeqID_5269
aaaagctccttggatgaggaacattttcgttcaaggcatctttttcataaaaaagaaagctcctcctcggaggaggagcaccctttttccaaacaaggacatagggatgatattttgtcggcccatgagcatagcctttttccccattttaatgaagattatagttcttttgatgatgaccataggcttcgaaccagaagcagaagtttaaggcttaaggccaattttcttgttgaaagagaaacagagctgggggagggggggataattttgaatttggaaaattcattattaagtggggaatttggccgttttattagggaggtttttgggggtttttttaatccaagggcccattttcaaccccctgaaataactgtttttttttttgggcttagagccaaaattcgacccctgttgagggctaacttgtaaaagctatagggggcggccaaaaattccattgctttaacttttttggaaaaatcaaagtcccttgctccca

SEQ ID NO: 15049 - DNA, 394 bp, Glycine max
  Coding DNA Sequence Number=SeqID_5270
ttgcgaacgctgattgtatcaagccacagctctctatttctacaaagcttctgctctttcatgtgctgcatgtgtgtatggctctatggcactacacataaatgggggacaccttgcagctggagtggattctctctgcaaaaatggaccaggttgtggtgcctgctttcagataatatgtcaagatccctaactctatgtagcaaagaacgtaccagaggtgcgatttgacttgacttagatacaacaatcaaactgatctcgctgctaaagcaggggaatcttttgggggcgatggttcacaaaggaaatggccaacaaaccttgaatcttggctggcttgaacttgataaaagatagcacgtgtgggattccagaatcacaatgcggtcga

SEQ ID NO: 15050 - DNA, 434 bp, Glycine max
  Coding DNA Sequence Number=SeqID_5271
agcacgcctacaacgggacttcttactccacgatgagaaaaaccctacccctcccacacccgcaggactcgcccgcgaagcgtccactcccttctagtgtatgtcacgtcttagcaacccatcactatccctctgtgaacaacaaccctaacgtgtcattaatctaggttcttactagtgttatatctctattctactaattctatgacttagtgtctagaggaatacccttctcttcttccccctatcctactacctgcatctagtatctcgtatcttattagcacctccacctctccacaatctcgccggcctctgcatcccaagctatctcgtatgtctacttatgtgcatgtacaccccaaacttcattcctcacacataaattagaggactgtcttgcagtacagataatctcatatacacccggactg

SEQ ID NO: 15051 - DNA, 523 bp, Glycine max
  Coding DNA Sequence Number=SeqID_5272
cgtatttgtcaattgttcttagaggggtaaattattaacaaaaatttaaacgaaactataaaatacgaagcaaaaaaattgaaatgtttcggtgtacattgctttttttatgaaatatttaagaagaatatatatgaatttatagttcaagtataaaaaagatgaaacaatggaaaatatcatgtgtctaacattacaagcgaagcaattctttgttgttgttgttgttttttgttttataaaaggttttattgtagtgtgaatgggtagaaattattgaattttcaatgattcaattggctaaaccattggcagtgttgttgattgattgtggttctggtccaattccaccagctagtcgatataccaactgtgacacttccgcagccaaatgatcaacatcctccttggaagcagcttcagcatagactcgaacaatatcttcagtgcctgatggcctcacaaacgatcttccgcgtggatatttttcaaccaattcatcgataccatcttgtaatccttc

SEQ ID NO: 15052 - DNA, 589 bp, Glycine max
  misc_feature (85)..(85): n is a, c, g, or t
  misc_feature (87)..(87): n is a, c, g, or t
  misc_feature (103)..(103): n is a, c, g, or t
  misc_feature (136)..(136): n is a, c, g, or t
  misc_feature (146)..(146): n is a, c, g, or t
  misc_feature (156)..(157): n is a, c, g, or t
  misc_feature (159)..(159): n is a, c, g, or t
  misc_feature (163)..(163): n is a, c, g, or t
  misc_feature (166)..(168): n is a, c, g, or t
  misc_feature (178)..(180): n is a, c, g, or t
  misc_feature (337)..(337): n is a, c, g, or t
  misc_feature (358)..(358): n is a, c, g, or t
  misc_feature (408)..(408): n is a, c, g, or t
  misc_feature (443)..(443): n is a, c, g, or t
  misc_feature (452)..(452): n is a, c, g, or t
  misc_feature (529)..(529): n is a, c, g, or t
  misc_feature (553)..(553): n is a, c, g, or t
  Coding DNA Sequence Number=SeqID_5273
ctcttgcttgtgatgctaactatgatgtatcatgctatcgtagatggttgtgtgctgcggtccgatctatatgcctatcacactncntctgcatacacacccnacacgaccataacctataccatagaccactaanccacacccgncacggtgccnncnaccnatnnnacttacatannncggaggtccgcggcgcgtgtcttgggcatgagcctgcgatacatgtagtcatatcctcggctctgttccgtgtatagatgtcagcggtgctatgatgcgtgtgccgtttggcatgtgtcttgctgccggcagtgttagtctctcgtgtctgtgctcnctagattatattaacaggagngtgtgggactgtgatgtgcgtgtcgatgtgatatgtgacaagataaaganggtacatccgtccaccagtccatagtctcactcgncctgcatcncttcgcgcacgcggcgcagagagcgcgtcgtgcacggaggagtatatgagctgattcgacccacggcctgtcgtggnactgtgcgctggctgtctagtctngcacggccctcgacgagctcgtgtgtctctctgtta

SEQ ID NO: 15053 - DNA, 438 bp, Glycine max
  misc_feature (47)..(47): n is a, c, g, or t
  misc_feature (62)..(62): n is a, c, g, or t
  misc_feature (65)..(65): n is a, c, g, or t
  misc_feature (184)..(184): n is a, c, g, or t
  misc_feature (238)..(238): n is a, c, g, or t
  misc_feature (275)..(275): n is a, c, g, or t
  misc_feature (284)..(284): n is a, c, g, or t
  misc_feature (300)..(300): n is a, c, g, or t
  misc_feature (320)..(320): n is a, c, g, or t
  misc_feature (344)..(344): n is a, c, g, or t
  misc_feature (373)..(373): n is a, c, g, or t
  misc_feature (381)..(381): n is a, c, g, or t
  Coding DNA Sequence Number=SeqID_5274
tccaccgcgacgcagtatgacgaatgtcatattttgagtaggcgtgnatagtaaaaccacanacnggagagtggataatcacttagtatcttgaatgcgtattatatttctagatctctctctttctacggcttactgttctatcgaatttgtgtatcagagagtgatgtcatgtgtttatatnttctgttgtcgtgtcttgagtttgtggtagtgcaggaggagtgggagggtgttntgaccactgtcaccacgtagtggggaagtgtattagngtggggggnagtgattagatgtagngtgtgtagatgtgtttgttntaggtgatgagatatatacagctngccattgttagatctatacatatacaggnttgtgtgngtgggttgggcggcgagcccctctcctctacatcttaatgtcgttgatctggaggag

SEQ ID NO: 15054 - DNA, 432 bp, Glycine max
  Coding DNA Sequence Number=SeqID_5275
attggatattctcccactagtttccttacttgcttctgtacgggatgtgacaatgcggcccctcaagctggccattggtgctacatgcttcctactagcttcatgttcgttcactttcgtgaacatttacaagcaggcatgtcatttcctgtttccaagcaaaaaatacctactacttgctacatgtttgctccgtgaagcttaacgaagcagccgtgttgcttgctaggaagcaagcaggcccattgtcttgagctaggttctcattgcaccagtagtcttcatcaccaatggacgttttgccactagtttccattgctgattcgcctgcttgccgccgtgactcatttgcatgttgtgcccccttatctttgaactcctcggtcccactgattaggatgtcagccaggcggcgtcgatgacctttgagca

SEQ ID NO: 15055 - DNA, 461 bp, Glycine max
  misc_feature (94)..(94): n is a, c, g, or t
  misc_feature (100)..(100): n is a, c, g, or t
  misc_feature (106)..(106): n is a, c, g, or t
  misc_feature (122)..(122): n is a, c, g, or t
  misc_feature (128)..(128): n is a, c, g, or t
  misc_feature (133)..(133): n is a, c, g, or t
  misc_feature (135)..(135): n is a, c, g, or t
  misc_feature (275)..(275): n is a, c, g, or t
  misc_feature (323)..(323): n is a, c, g, or t
  misc_feature (330)..(330): n is a, c, g, or t
  misc_feature (369)..(369): n is a, c, g, or t
  misc_feature (402)..(402): n is a, c, g, or t
  misc_feature (406)..(406): n is a, c, g, or t
  Coding DNA Sequence Number=SeqID_5276
gctcactctgacgacgagaacttattacgagtcttgcccttctctctgagctatgtcatctctgttgtatgacgtctataggtactccaacagngagtcnattctnctcttcgtgtagttgntgctgncgctncntgctctctcgctcgtctggtggcacacgtgtgtcacccgatactagacacacggggacgtacgcactccccgccctagtccagctgcacacgacagagtatctctggctcttttgctcttagtcacgcgaggggctctancagtaagggtgtggtatatctcacgcctaatctctattcattatctanctctgangcggtagggctcatgtaatggtatgactctgcagctgcnagagagcgacgtgaatacagagtgagagagaangggngaattcactaggtctcaacccacacacagaggagcggcggactctgcactacaga

SEQ ID NO: 15056 - DNA, 400 bp, Glycine max
  misc_feature (64)..(64): n is a, c, g, or t
  misc_feature (232)..(232): n is a, c, g, or t
  Coding DNA Sequence Number=SeqID_5277
atcaactttagcactcaattgtttatatattaatctttttccaaattcatatttttgtttttgngatccacttctgcgtggattttatctccaattttatattttccttggtttaagcgtagtttgattatgtctctctgctctcaaagaaagacataattatttatattgattcaactaaaacaggaaaagtgcaccaaccatggtgacaatatatattgtcccatcacanataaagtgcatctgagcttcacgcaaacggaaatctgtgaaatcgtaggtcctgaccagcgactccaaaaagataagactgaacatcaaaaggaatgggaaaatatttcttctcttgatcacttggcaatggttttttgacaacggaacgctttccttctgatcattt

SEQ ID NO: 15057 - DNA, 559 bp, Glycine max
  misc_feature (265)..(265): n is a, c, g, or t
  misc_feature (456)..(456): n is a, c, g, or t
  misc_feature (516)..(516): n is a, c, g, or t
  Coding DNA Sequence Number=SeqID_5278
atgaccttgtgtggagtttgtgtaatatgctgccttctttggtggcgctgtctacgctgtcattacggcggtgatatgcacatccccctcccactccgtgcaccgtcgccgtgccgcgcgctgctctactcttccggtcttcctctcctcttacctgccctcactgctccgagagcgacgcctctcttgtccatgtgttgcttatcatgttcgttgccttctagtcctcagctcttctcgcgtcttaggagctcccgccgcctcnctaccgccgcactccggcatcgatgcttactccttctctctgcatgccacgacccctcatataatcttcgcatgaacgatatattctcatatattaccacaccttctactactatcactcgaatactccggtgcccttatattatgcgttatgtatcttatcctctctctctatgtctcttcctgctgctnttctattgcgtcctgcactgactcttcgcgcctcatcacccacatcctcactctctctcngtgcgtctgttgttcttgctgcattctcctctattgtactata

SEQ ID NO: 15058 - DNA, 202 bp, Glycine max
  Coding DNA Sequence Number=SeqID_5279
gatgacattgaccaagaaaccgaccaggactggaagggcctccgtgataccgtcaagctcaccggtcacaattgccaggcgaaggatacggtggtccccttcgccagagcccttgttatcaaaggacttaaggagcccgatcgcgacctgaagaagaccataatcatcttgcgcaccgggcacatctcgctcgacgacgtca

SEQ ID NO: 15059 - DNA, 196 bp, Glycine max
  Coding DNA Sequence Number=SeqID_5280
cttgacgagattaaccccgattagaaggaagattagagggaagctattcattcagcgaatctttttgtttgtaataggtgctttgcctttgaaaatggtcagtgcataaatggttttaaattcaagctgcacaaacttgaaaaaatacccaaaaaaaaagggcgccccccagaaaggtacgcgtggacccaagaat

SEQ ID NO: 15060 - DNA, 486 bp, Glycine max
  Coding DNA Sequence Number=SeqID_5281
gtgtggccgatgtccaggtgttctttttgggcccgtggggccggggggggcgggggtgggaagcccacccactggcgtggggtttcggacgcccatgcggagggtgtgttggttttgcggtcccaacccatggggtagggggggggggcacatttgcgttgcaagttctttgttgccagggcctggggggggcgttcccgtgtgtccggcggggagccagtcagcggcgtcggggggttgttgttagggtcttgtttgcacaccggcggcagtttctggcagccgttccgtcacttgggggccggcgtcatggcgaggccccggccccccgagaagaatctgcagttgtcgcatcacttgggggactgggcgttcgccctgtgagaggattcccatggccaggacggcctgaaggatcaggatgaccaggagtgtgctactcttcatcgttgctcgtaagcttctctgggaagctctgcactgtcc

SEQ ID NO: 15061 - DNA, 534 bp, Glycine max
  misc_feature (118)..(118): n is a, c, g, or t
  misc_feature (356)..(356): n is a, c, g, or t
  misc_feature (494)..(494): n is a, c, g, or t
  misc_feature (497)..(497): n is a, c, g, or t
  misc_feature (500)..(500): n is a, c, g, or t
  Coding DNA Sequence Number=SeqID_5282
gtgtatacacacaacttatgggacgagtcatgacggagctaagagtggccgagagtagcagatgtggtggctgttggcgggtagacacagagtgggtttagctatcttatcgtaatanatagaagagtcattggagagatagtgaaagcgcgaggagagagacaagcaggaccgccatatgcggtgcgtcgactgggtcctcatatattgtgttatttgttgtgttgttggtgctcgggagtactattgtgtagagggacattgggtaatgaacagtagaagattcaaatacagaattatattattattagttcgttgtcgcgtggtcgcgcgcgcgtggctaggcggctatcgtnctctctcctctctctcgaagtgcgcgaggattctgctactctctgtcatccaagcatgtgtatgtttggtggttggtgtgtgtgttcctatcgttgctgtgcgtcggtgtggtggggtggggggtagggagtcctcgnttnctntcgggggggtgttgtacgtgtgtttaggatttgc

SEQ ID NO: 15062 - DNA, 328 bp, Glycine max
  Coding DNA Sequence Number=SeqID_5283
tttggaatttgcaacagacatgcaattgagggtaccagattccaatggagattgaagaattttcacttctggaaacccgaccagtggcccctcatccgggacacattggactaacactccccttaacccgacccccgcacccgaaagaaaccccttgccccaattactaaacccaaccccacaacaaaggcaaacttaaaattcctacccccccaaccacttccaatctttatttggaaactccaccccccgggcgagcacttctgcccaagaaatacttacagcgcgaacccactcctcagccaaacactgggctatacaaaaatac

SEQ ID NO: 15063 - DNA, 89 bp, Glycine max
  Coding DNA Sequence Number=SeqID_5284
gcccgacgacaacggtacgtgcctgcccatcgagccgtgtgggtgcttttgatgcagcgattgctctctgttctaatgccgttgctcaa

SEQ ID NO: 15064 - DNA, 425 bp, Glycine max
  misc_feature (87)..(87): n is a, c, g, or t
  misc_feature (96)..(96): n is a, c, g, or t
  misc_feature (229)..(231): n is a, c, g, or t
  misc_feature (296)..(296): n is a, c, g, or t
  Coding DNA Sequence Number=SeqID_5285
ggaggaggcacctgctatacgtattctggagttgcgatagtgtgtgtgcggggcggagaataggtagaatatcgtgtgtatggtaanagagacgcngtgagcgcagtatatcagcttattgacaaggtagttgagatattgcactctttcgagcacacgagaggtgcgttgtgtagtcgaacgatgggcgggagttaggagcgcggttgagattgttagtacgtgtgtnnntgtatgttgtatatatgtgtagtggtcgacatgccgtgtgtgtgacttgcaaaaagatatgaggnggtgagaataagagatgcagcaaactgcgctggcagggcacgcgtggtgtgatacacaacataggttgcgatgagggcggggcgcgcggcggcgcgagaggagggagagcgcgagagagtaagtacaaa

SEQ ID NO: 15065 - DNA, 574 bp, Glycine max
  misc_feature (268)..(268): n is a, c, g, or t
  misc_feature (483)..(483): n is a, c, g, or t
  misc_feature (489)..(489): n is a, c, g, or t
  misc_feature (492)..(492): n is a, c, g, or t
  misc_feature (494)..(494): n is a, c, g, or t
  Coding DNA Sequence Number=SeqID_5286
aacaatcgtacattgcgtgggtagagatgcgtgtgtggcgggtgttgagtttgagttaccaccacagggggatatctagttgcgagtgcggcgccgcacgcggcgcacggtgagtggaggcggacgaacgattgtcgatgtacgcgagactgaggagtatgggagcaacaatatcgcgcggcagtgtggaagagagagagatgtacgggggaggggcgatcgggcagcgcggagaagcggacgtgtcgacgcctcgcgcgcgcgcgcnccacgccgcgatcctcacaagggcagccggcgtcacgtgagcgcgcgtccacgctgaacacaacaactatcactacgagctcacatgcaccgatgcgcgactcgtaccatgatcatcgcgacggtggagcggcgtgcactgtctcgaacagatatagtgatcgctacttccacatctgcagctgcgagcctcaccacactcactcgacgacccanagacgnggntngaacggagtgcgcgtcttatgaatgcgagtgggctccgcgccgcgcgctggtatcgatgcaacgacgatctcacgcgctc

SEQ ID NO: 15066 - DNA, 516 bp, Glycine max
  misc_feature (121)..(121): n is a, c, g, or t
  Coding DNA Sequence Number=SeqID_5287
aacatccatacacttcaccagagaggcagtgaaagatacaagaaccggcaaagcaaaacatggcgacccttaaggtttcatctcatgttccttctccatctgaagatgctgagcaactganaagcgcctttgacggatggggtaggaagaggacttgatcatatcaattttggctcacagaagcgctgaacagaggaagctgatcaggcaagcataccatgaagcctgtggagaagaccttctcaagactcttgacaaggaactcactagcgacttcgagagagccatcttgctctggactcttgaacctggtgagcgtgatgccttgttggccaatgaagctaccaaaagatggacttcaagcaaccaagtgcttatggaagtagcctgcacaaggacctcaacgcagctgtttccgctaggcaagttacatgctcgttacaagaggcctatggaaaggagggctccccaccccacggggacttcaaaggtttgggcctccttgttacctcaacg

SEQ ID NO: 15067 - DNA, 495 bp, Glycine max
  misc_feature (90)..(90): n is a, c, g, or t
  misc_feature (395)..(395): n is a, c, g, or t
  misc_feature (405)..(405): n is a, c, g, or t
  misc_feature (424)..(424): n is a, c, g, or t
  Coding DNA Sequence Number=SeqID_5288
agataaggttcgttgtgtcgctcttctaatgtgtgatgagtggttgtatgacactaattgatgttgattcagggtttgtcagttggccgnggggggtatgattggggttacccgatcacctcgtcctagagacctgcgacacgcccccggcggcgctggatggacgctcgagagagacaggtggaagacatatagagccggtccccatctatgttcgggctgtgtgttcttcgctttcgtgttgtgcggtaatggagaataaaggatttaggtagggagaagtaagaagcggaagagagagcgcgacggatgatgagaattcgctgcaggggtggtgtggggaggaaatagatattcatctctactctcttactctttatctctccccgcggggnggtgaatggnggagagagacatgagaagntagtaataataacatccatagcccgcctgccggctaggtgactctcctgtctctgtagcactaagggcgga

SEQ ID NO: 15068 - DNA, 278 bp, Glycine max
  Coding DNA Sequence Number=SeqID_5289
ggttgacgtgaagatagcaatcccaatataaactttctctgatgacggcccaaaacagttttttgttggtagagacaaatgctgatcggcctggattactggtggatcttgtaaagactattacggacattaacattggccgttgaatccgagagaatttgacactgaggggctcttggctaaggcaaagtttcatgtcaactacaaggataaagccctcatcaagcctctcgcagctggttcttgttaacagtttgtagctttttcttgaggcggcc

SEQ ID NO: 15069 - DNA, 523 bp, Glycine max
  Coding DNA Sequence Number=SeqID_5290
tttactagctgatgtgccgacatgcagccatgcatgcatccgagacgtaaatgctgctgctgccgttgtgtgaaccggaagaccaggtttgactcaacagaccccgccgcgctcgggctgggcgccgtcaacaagacccgcgccctcggcctccccgaccagtgcggcgtcaagacgccgccgctcagcaactgcgcctctgcccccaccacgtcgccatcctccggcgcgccggcgggacagacgccaacatcctccggagtagggtccaagtcgacgccgacggcggacgtggggagcggcggcgcgtcactccacagctcggccggcatcatcgccggcttcatcgtgcccgcggtctacgccgtggccaccctgtgatctgattggcgggtcgacgcggcctcttcttcttgtcagtcagtcagtagtgatttcatttgagattatatatactggggttcggggatcgaattggcgcgcatacatgtgatatgtgaatgtgatccatggccgattccat

SEQ ID NO: 15070 - DNA, 593 bp, Glycine max
  misc_feature (280)..(280): n is a, c, g, or t
  misc_feature (365)..(365): n is a, c, g, or t
  misc_feature (444)..(444): n is a, c, g, or t
  Coding DNA Sequence Number=SeqID_5291
agtcttagtttgtcgtagggctgcaagaaccgtgcacgttcgatatctgtagcgcatgagtgaactattctttctgtttcatatctattgagatagagtagatcatatagatctcacgactctgacgcgtcgctgctagtgtggtatgaatgaatcacgaagatgctggctaattgttttatcccgaatgggcaatgcactgcagaccattaggatttagaggtgggttctctggcggtatttgttaaaatagaatattgttatcatgtattacttgtgncggtagacagatatatggacaagataataagaaaagtagctttaatttcatccttatggaaagtgcgtgctatgtgtcgctggtnggccaagaaatatagccaacgactagagggctgggagagtgagcaacgaggaagagagactagtgttctgccgttggtnggaacaatatacttatacaatagatgcaggctgcgcacaagaaacaatgtacacaacacagtggtttttgttagtcctgttttattattttttagtttgttaggtggtcgtatgtttggagtttatggtgttgcgcaatgtcttccgaa

SEQ ID NO: 15071 - DNA, 531 bp, Glycine max
  misc_feature (40)..(40): n is a, c, g, or t
  misc_feature (110)..(110): n is a, c, g, or t
  misc_feature (141)..(141): n is a, c, g, or t
  misc_feature (202)..(202): n is a, c, g, or t
  misc_feature (223)..(223): n is a, c, g, or t
  misc_feature (240)..(240): n is a, c, g, or t
  misc_feature (250)..(250): n is a, c, g, or t
  misc_feature (391)..(391): n is a, c, g, or t
  misc_feature (407)..(407): n is a, c, g, or t
  misc_feature (418)..(418): n is a, c, g, or t
  misc_feature (444)..(444): n is a, c, g, or t
  misc_feature (446)..(446): n is a, c, g, or t
  misc_feature (451)..(451): n is a, c, g, or t
  misc_feature (506)..(506): n is a, c, g, or t
  Coding DNA Sequence Number=SeqID_5292
gtaagagacgcctgttagagcaaatagtggtgctgcagcnccccgctagtggtggtgtagacgcaccgcagaagccgctcccgcgttgtaaggcgcgctcgccgtatctngcttgtgtggagtaagtgttagagaagacgnagcacgggcgcgcagcacagatcactccaacacgcgaaatgagcaggataacgcgccccgngtacgcgctccgcaggagggncgagcgttccctatatncctgctcggncaacgcacgcgcgcgaatgtgccatccgccgagtgcggagtctcttagatgatatcaggccgctcctcacttctcgttggcgcgggatgagtgactgcgtgcgtgggtgcgcgaacgagaggtgctcatcccagcgagagntgtggtgagggtgttngctctcgctgncgtgtatgtgtcgtgctctcgtcagntntgtangatacgtcgcgagatgagtgtgtgtgtgagtatagaggcagacatgatcgagtgntaccgtctgcatgcgaagagcactg

SEQ ID NO: 15072 - DNA, 508 bp, Glycine max
  misc_feature (120)..(120): n is a, c, g, or t
  misc_feature (128)..(128): n is a, c, g, or t
  misc_feature (130)..(130): n is a, c, g, or t
  misc_feature (132)..(132): n is a, c, g, or t
  misc_feature (146)..(146): n is a, c, g, or t
  misc_feature (217)..(217): n is a, c, g, or t
  misc_feature (293)..(293): n is a, c, g, or t
  misc_feature (330)..(331): n is a, c, g, or t
  misc_feature (340)..(340): n is a, c, g, or t
  misc_feature (343)..(343): n is a, c, g, or t
  misc_feature (347)..(347): n is a, c, g, or t
  misc_feature (363)..(363): n is a, c, g, or t
  misc_feature (366)..(366): n is a, c, g, or t
  misc_feature (427)..(428): n is a, c, g, or t
  misc_feature (435)..(435): n is a, c, g, or t
  misc_feature (437)..(437): n is a, c, g, or t
  Coding DNA Sequence Number=SeqID_5293
gttgctctatctctttgtagaaagtcagtttcgtctgcgctatagcatgtatgatagacatgagcgcggagcttatacatactacacctatggcctgatctcactactcactccacctantctccgcncntnccacacctattcanttcgcagattacatgctccctccctctacgactggcgaacgctacttcgcgtgagtattatcatactatanctcacatatctgtcatataccattcccatccgtataatccataccgcgttgcgtgcgcgatcatgcactagcagantgtagtgtatgtagacgggttgcagagtagaggcganncctccgacncgncatncgaatccgcgcatatntanactcctaacttattatgatgcgcgaggtgttcgacgcgcgtcacgcgtactgctcgtgtgnnttgcgcncncctgcacagcgctcgcatctagcagcaactctcgatgtagcgcatcatcagaggcgctccagaagcgacac

SEQ ID NO: 15073 - DNA, 493 bp, Glycine max
  misc_feature (167)..(167): n is a, c, g, or t
  misc_feature (191)..(191): n is a, c, g, or t
  misc_feature (219)..(219): n is a, c, g, or t
  misc_feature (234)..(234): n is a, c, g, or t
  misc_feature (276)..(276): n is a, c, g, or t
  misc_feature (278)..(278): n is a, c, g, or t
  misc_feature (296)..(296): n is a, c, g, or t
  misc_feature (311)..(311): n is a, c, g, or t
  misc_feature (341)..(341): n is a, c, g, or t
  misc_feature (375)..(375): n is a, c, g, or t
  misc_feature (377)..(377): n is a, c, g, or t
  misc_feature (415)..(415): n is a, c, g, or t
  misc_feature (434)..(434): n is a, c, g, or t
  misc_feature (453)..(453): n is a, c, g, or t
  misc_feature (455)..(455): n is a, c, g, or t
  misc_feature (462)..(462): n is a, c, g, or t
  misc_feature (464)..(465): n is a, c, g, or t
  misc_feature (468)..(468): n is a, c, g, or t
  Coding DNA Sequence Number=SeqID_5294
acactctctgcgctacgtagacagacagaccgcacacacacatcatacatcccgccactattatatgatgcgtcgtatacctagtatctcagacgcactccgacagcataaataacatctcacacacagagacagcacggccccatctctctcactcacgctatcantaactactcatgacagcaatctantccgcacataacacacacactactactntcgcgcacacaactncactctactgctgacacatcgctctgcacttacgacatagantncgtcaataacatactctncactcaaccatgcgnccacagcgtacaccactaactgctgtattnctcgtcggccacacaatacaatcactcgtcgccncncgtcgacgcaataagatcatctatcttgtgctcatgtngctaaataacacacaccgncgcgcacacgacctctttncntctctcncnntantagcaacacacaacacgatgactcc

SEQ ID NO: 15074 - DNA, 537 bp, Glycine max
  misc_feature (68)..(68): n is a, c, g, or t
  misc_feature (136)..(136): n is a, c, g, or t
  misc_feature (175)..(175): n is a, c, g, or t
  misc_feature (229)..(229): n is a, c, g, or t
  misc_feature (255)..(255): n is a, c, g, or t
  misc_feature (327)..(327): n is a, c, g, or t
  misc_feature (422)..(422): n is a, c, g, or t
  misc_feature (424)..(424): n is a, c, g, or t
  misc_feature (451)..(451): n is a, c, g, or t
  misc_feature (453)..(453): n is a, c, g, or t
  Coding DNA Sequence Number=SeqID_5295
acagtcatctcaatatccagtacgatctcgcttgtcatgcgcacgcatcgacgtcaccgcacagcatnctcagcgtgtgtagtatgtatgcgcgtatcatgtactcaatatatatgatatgtctacctcgcgccancgactcgactcgactctctgatatatgtgttgtgtgtantctacgtgcgcgctcgctgcctgcccacatgtaagtgcgctgctcctagagtgngtgatctttctctcttacgcgtctcntatgtcgcatacaatccaccacgccagtcgatgcgcgatagtggagatggctctattgtaattcatgctgangtcacgagcgcgatcgagcgtacagcagagagtctaaccacaactcattcacacatgtgtcacgtcttcgttacagtgtgctgtagaccctgtcncntgtctatgtctgctactctactatganantgtgtgactagatgactagcgtctagtgagtccgcatcgccgcgctcccactagacctctatcataggccgtcattctcactgg

SEQ ID NO: 15075 - DNA, 452 bp, Glycine max
  Coding DNA Sequence Number=SeqID_5296
tggttggaccaactcgcgctccatctcggaaagcccgtacatcgacacggcgcggcggagccacaggctctcgccgggctcgcggcggcggcggcggcggcgcgcggagcagctcgctggcgagcgcgcctgcgcaccacccgcatgagggggaggccacacgacggcgggatccgccgcgccgtcaagagagactgctgaaagggaacagttcgatccaaaagttttcacagatgcaaattccttgatgccatagacattggatgcaggtcaacagcaacaatagcgtcgtcgctgtctgttaaggaacaatcccaagaggcgcactgcaaacaaggatacagttcaggaaaaacatctctgcaccaaccaggagaatatcagtgggagcagtgtccagaaaggcggccgcttatggctcggcggcatataggctccagacgacgcgctct

SEQ ID NO: 15076 - DNA, 553 bp, Glycine max
  misc_feature (35)..(35): n is a, c, g, or t
  misc_feature (47)..(47): n is a, c, g, or t
  misc_feature (149)..(149): n is a, c, g, or t
  misc_feature (183)..(183): n is a, c, g, or t
  misc_feature (203)..(203): n is a, c, g, or t
  misc_feature (234)..(234): n is a, c, g, or t
  misc_feature (236)..(236): n is a, c, g, or t
  misc_feature (278)..(278): n is a, c, g, or t
  misc_feature (318)..(318): n is a, c, g, or t
  misc_feature (342)..(342): n is a, c, g, or t
  misc_feature (350)..(350): n is a, c, g, or t
  misc_feature (356)..(356): n is a, c, g, or t
  misc_feature (375)..(375): n is a, c, g, or t
  misc_feature (417)..(417): n is a, c, g, or t
  misc_feature (499)..(499): n is a, c, g, or t
  misc_feature (509)..(510): n is a, c, g, or t
  misc_feature (515)..(515): n is a, c, g, or t
  Coding DNA Sequence Number=SeqID_5297
aagtgcgagtcgaggtcgacacccactgcgcgcgnagctggttagtntacgacgatagtgtatgcgtgctcgcgagcgcagatatagtatcgagtggaatacatcatgatcatgactgcgtccacgcagacgagatggatcaagagaancgaatggtatcagctatgctccgatctgctcacnctatggcgcgtactgcactnatcacgctgagagacctcagatgatgaagananacgttgacacgctagagtagtcgaatcgtacattatagagtnatatgatatatcgagatacaaggatccggtctccgagtangacgcgacggagtgatgatgtganactatgancaggancagcagaacgatgagagcngtctgcatcgatacgtgctctcaactgacagatagcgtgtanctgatcgagatcaacatgtgactgctgcagctggaactcatctatgagatcagcgagtatgatcgaggctgtgagtatctantcataacganngcgancaacgttgatcgcatgactgctcgacggctatgaagta

SEQ ID NO: 15077 - DNA, 329 bp, Glycine max
  misc_feature (298)..(298): n is a, c, g, or t
  misc_feature (301)..(301): n is a, c, g, or t
  Coding DNA Sequence Number=SeqID_5298
gaccactccaaaccctcgaatccaagccgcctccgcctccgcctccccgcggatctcccatccatccatggccgccgccgccccggcccgcaggctgctcctgcgcctgcgcctccccctccccctctgcgacccgccgccggcccccgtcccgctcctcccccacctgctgacgccgcacctccacccgcagccaccgccgccggcgcctccgctcccggacccgaagctccgggacctcctcttcgccttccaccccgccgtgcacctatacccgtccctcgtcgacgtcccgagnggngggccaggcgactgcgacgcgcgcgagg

SEQ ID NO: 15078 - DNA, 555 bp, Glycine max
  Coding DNA Sequence Number=SeqID_5299
tgtggtctgtattaaaagcggctctgccatttccatatcgcctcgagtgttattttatttggggggcgccggccattattgtctatatggtgctatataactgggcggggagagcatagctacgttaatttttggggccagaccttattgtagtcaggggattttatttacgttggggctggacggttgatcggagtatactattcaggctggcttggttattgatttatggtggtttttcggagggggggcgggcgagcccgcgggggtttttatgaggtggggttttcttattttatatgtagggtgtgttatcatcatatgagggggagggtttgtgtatttttatatatgcggttgtgtggagagggtggcgcaatatcacaataaatggcacaatataggggggggggcctatgtgatcatcttgcgggcttataggataatgcatcgcgcgggtgggtgggaggggaatagtagattcatttcagctccgtggggatcgcatctagttatggtatcggcgcgcctatcggtgcgaaacacccgacaagg

SEQ ID NO: 15079 - DNA, 262 bp, Glycine max
  Coding DNA Sequence Number=SeqID_5300
aacctggtggccttgctcaataaaatttaccgctgcgacttcaagtgtccgccggggttctcctccgaggcgcagaggctcatcaccaagctcctctaccccatcccgatcacgcgaatctcaatttcaaaaatcatggactcgtcgatgttcataaaacccgtgccgaataacttgatgggaaagaaaatagaggaatcggatctggaggataatattgatcactatgatcatgacgtcgctactacaatgaatgcttttc

SEQ ID NO: 15080 - DNA, 511 bp, Glycine max
  misc_feature (27)..(27): n is a, c, g, or t
  misc_feature (98)..(98): n is a, c, g, or t
  misc_feature (106)..(106): n is a, c, g, or t
  misc_feature (109)..(109): n is a, c, g, or t
  misc_feature (132)..(132): n is a, c, g, or t
  misc_feature (213)..(213): n is a, c, g, or t
  misc_feature (271)..(271): n is a, c, g, or t
  misc_feature (278)..(278): n is a, c, g, or t
  misc_feature (291)..(291): n is a, c, g, or t
  misc_feature (353)..(353): n is a, c, g, or t
  misc_feature (383)..(383): n is a, c, g, or t
  misc_feature (434)..(434): n is a, c, g, or t
  Coding DNA Sequence Number=SeqID_5301
tttgtctgctgtagaactccggtcacnactatcgtatccaccatgtatcacgaacgacacagttcgtgatactatgtagcttctcactgagatgtgtnctgagcgncangtgagatcatgctgtcgatccgncgcgcatcgctctgacgaggtaatctattgtacagtgaatgtggatgtatagattgagtatattgacgtagcgaatgcatnatgaggactattgcgtatagttagctctcgatcgcgtatgatgacgctctaagagctnagtacgntgtgatcgagagncgcactgaggttcgagaatactgtcatcgacgtgcgacacagttatgagacaatacgtatangtatatgatctgacaagctcgatgtcgtgngtcacatgctgtaagaaactgtatcgcgtgctcatgtgtgtcttgtaagtnatcatgacgtatatagactgacgtatgctagcggctattcaaagaatgcgatgagttcatactcaccacgatgtgca

SEQ ID NO: 15081 - DNA, 405 bp, Glycine max
  Coding DNA Sequence Number=SeqID_5302
gcacgggtgaaggtcagaaaatcatatttaacacatttgttcttttggtgacaccggtaatggaacccaaaggcttgaagcttcaacaagccgtggattttgtgatcaagccccgtctcgattcagggatggctggtctcattgctgtgtccaacgttcgggaagtggcttatggtttcaattccaatggcatgtttaggggctgtgccgctgaaaatggcttcatggaggtcggaatctgggaatagcttcattattttccttcatggttgtttcgacgcagctttggcacttctgagccatgttcccctgtagtgcagggtctttctgctggggccccgtttagataacatatggtattccttgtttctaggtatcacatacccctgtgaaaccatactatgg

SEQ ID NO: 15082 - DNA, 430 bp, Glycine max
  misc_feature (57)..(57): n is a, c, g, or t
  misc_feature (64)..(64): n is a, c, g, or t
  misc_feature (72)..(72): n is a, c, g, or t
  misc_feature (77)..(77): n is a, c, g, or t
  misc_feature (79)..(79): n is a, c, g, or t
  misc_feature (81)..(81): n is a, c, g, or t
  misc_feature (84)..(84): n is a, c, g, or t
  misc_feature (104)..(104): n is a, c, g, or t
  misc_feature (125)..(125): n is a, c, g, or t
  misc_feature (138)..(138): n is a, c, g, or t
  misc_feature (144)..(144): n is a, c, g, or t
  misc_feature (164)..(164): n is a, c, g, or t
  misc_feature (166)..(166): n is a, c, g, or t
  misc_feature (176)..(176): n is a, c, g, or t
  misc_feature (179)..(179): n is a, c, g, or t
  misc_feature (183)..(183): n is a, c, g, or t
  misc_feature (252)..(252): n is a, c, g, or t
  misc_feature (274)..(275): n is a, c, g, or t
  misc_feature (289)..(289): n is a, c, g, or t
  misc_feature (328)..(328): n is a, c, g, or t
  misc_feature (343)..(343): n is a, c, g, or t
  misc_feature (347)..(347): n is a, c, g, or t
  misc_feature (360)..(360): n is a, c, g, or t
  misc_feature (372)..(372): n is a, c, g, or t
  misc_feature (378)..(378): n is a, c, g, or t
  Coding DNA Sequence Number=SeqID_5303
tacagcgaccagctcatcataactacctgcatgccgcgctgcctagatcgcagaggntcacgancgatgcgnctggntncntcnctgatactcacctcattatntcgtccggcggcacgtgcagnacggagcgcagcntgcagnagtactttctatatgagttntnttaatcatanaanctantactatatcgcctgacatcataaactgcatgtcgtgcgtcacagcaacggctcgaggatgacagactanacgacagctcgtcgtacagttnntacagtgcaggacncgtcagcgtgctcagtgcttggcccggtactacgcggancagtcgcgtcgacgnctcntgcacgcaatctnattacgtatcancgcctngcatctgccgcgtacgagagtcacgtcgcacaatctcgtgcacactgtacgg

SEQ ID NO: 15083 - DNA, 600 bp, Glycine max
  Coding DNA Sequence Number=SeqID_5304
taagtctctctgacggagcggacgacggagataactgtatcacaggctcgtgcggcgaccatctacgagataccgaggggctgtggctggcgtatatttccggcgctatccttattctcgcgaaaatttaaggtgacagttgcacggcgcgatctggacttatatatacggtcatacagatatagtctactgtaatatggtcacaatgaattaggcgatgaatataagaattaaatataaggatcttttcggtgctttgtcatctttatatatatagtatgtattagggtgcgttctatggatgttgtttacttggatccagtgatagggctgtggtggtgtttcagattatgttcgtatgataaagagaatagtatatttaggtagaggaagatcttcgtacgtgttttaggtaggagtataataacaataatacccgcccttcgctccgggtcgcggagcgggattttttatcttgtaatggggattgtgcatatatagggccctatagagaatactgtacaacaagcttaccacaggctaatgatattgtggggagtgggcgtgcctcttcggggcctatcactgacgaaggtgcgc

SEQ ID NO: 15084 - DNA, 538 bp, Glycine max
  Coding DNA Sequence Number=SeqID_5305
aagacaaagcttctacaggcgtgagcaacaatttcggcgaaatgctcattggtaaaggcgctaagttcaaccaaaagaacctggcagccatcgactaccagaacgtgaatccgctgggctggactggtgacgctaaaacagacgaccagatcaatacactgttgcacaactacagcatccgtttcaacgaagaactcggacgttacaagcgtgagaaattcaacatctctattggtgatgaattacccgcaggtgtattgaaactggctaaagtttacctggctgtgaagcgtaagctgaaagtgggagataagatggcgggccgtcacggtaacaaaggtatcgttgccaagatcgttcgtgcagaagatatgccgttcatggaagacggtacaccggtggatattgtactgaacccgctgggggtaccttcccgtatgaacctcggacagatttatgaaaccattctgggctggacaggcaagcgcctgggcgtgaaattcgctacgccgatcttcgatggcgcttctacagatga

SEQ ID NO: 15085 - DNA, 259 bp, Glycine max
  Coding DNA Sequence Number=SeqID_5306
agtctcatcatttgtctcttccaacaatccacccaattgcaccaaacaaatgacgtgactcaacacccatgtagttcttggcctgctccactagtgcctcgccaatcttcgcaacaggtggccggcagtttgcgtcggcttcaccgcacccggccatgtcagccaccgccagcgctgcagaaggcagcacccaatgggtgctgctgccacaaacgcctcccttcttcgcggccgtggcatcgtgtcatcgtcacctggg

SEQ ID NO: 15086 - DNA, 588 bp, Glycine max
  misc_feature (103)..(103): n is a, c, g, or t
  misc_feature (139)..(139): n is a, c, g, or t
  misc_feature (239)..(239): n is a, c, g, or t
  misc_feature (277)..(277): n is a, c, g, or t
  misc_feature (295)..(295): n is a, c, g, or t
  misc_feature (350)..(350): n is a, c, g, or t
  misc_feature (367)..(367): n is a, c, g, or t
  misc_feature (406)..(406): n is a, c, g, or t
  misc_feature (441)..(441): n is a, c, g, or t
  misc_feature (482)..(482): n is a, c, g, or t
  misc_feature (523)..(523): n is a, c, g, or t
  Coding DNA Sequence Number=SeqID_5307
atcactacaccacgaacatcactaacacacgcgtcagtgtcactatcctatatgtcatatcttatgcattattatctattatgtctctcgtcgtcacacgcangtgagagcgaatgcgcacgctgactatgcacgtcancataacaacacgccacacgtctcgacaattcttccgtgctgattgcgcgccctcttcatcctattctgatatgtcccctcactcttccatctcttctcgntctctagtcgacgcgacactgtagctggcgtatgttgntgtgctgttctttgtganctccgcgctcgttttgttctactgtctccgtcgtcgtagatgctctgtgcattgnagtatgtgtagctgacnctatcatctgtgagtatgatgtatacgatcacgcgcccncacacgacacctcactctctctctctacactactnacatcaccgcgcatacacatccacccacacaatacatccanctctacactctcacttaacgcgactcacacatgatataacnacaagcactctgcacctaccatctacgtaataacgagcgcgatcggtgtgtacttactgcattgt

SEQ ID NO: 15087 - DNA, 306 bp, Glycine max
  Coding DNA Sequence Number=SeqID_5308
attctgcagtttacacccttcacatgggatttttatggctccggctcatgaagatgaaagcccatacaccccaggggaattggtggctttggatgatatccttctgcatttttatggggagctctaacaaaaaatagctgagcttaaaactcatttatgggctcccaagaacaacaaacaaaagccctggattgggattggaacctaataagccccaaaaaaaatccccctccctaccccccgtgaccaagttgtataaacctcttgaggggaaaatttcgcattcctcctcctttggaggccaaa

SEQ ID NO: 15088 - DNA, 401 bp, Glycine max
  Coding DNA Sequence Number=SeqID_5309
acttctcaagtgattttgtaactcgcatccgctgcaatgacgaagggaacggggagtttcggaaagaggaggaacaagagtcacactctctgcgtgagatgtggccgtcgcagtttccacatccagaagagccgttgctccgcctgtgcttaccccgccgctcgcaagaggacctataactggagtgtgaaggcaatccgtaggaagaccaccggaactggaaggatgaggtatcttcgcaatgtgcctcgcaggttcaagactggcttcagagaaggtaccgaagccaagccaaggaacaaggcagcagcttcatcatcttaaacactagatttatggcgtctgagtttgttggcatgaatactctgttttattattcagcatctgattactatttatct

SEQ ID NO: 15089 - DNA, 492 bp, Glycine max
  Coding DNA Sequence Number=SeqID_5310
acggtttcccatagagggtgccctgagtgatgcgacaaacactgatcgacaaaacctatcccataaccttttacgtctcctaaaagcgaatttgggatatttcagaaacagcctaacatatgatgccaccaagctgaggatcatctctcagttcgtgaggacccggctcaactgacgtgactcccttactggccagcaaacacgattcacccaaaagcgagcgaaattaaaattactggtgctgcaaaatacctgcgaccggatgaaaaacatgagtggtcatccaatttagtgttcttgaaagacagccccctttcaacacatggcccagtaccaataaggtccgcatctatggcccttgccaacaaataggcaatgagaaggcagaatgctgaattgtaggcgacaatattttgataaaattagcgttaaaattctgatatatcctttcatttcttatccaacaggccaacttcgacgatatcccttata

SEQ ID NO: 15090 - DNA, 478 bp, Glycine max
  misc_feature (119)..(119): n is a, c, g, or t
  misc_feature (423)..(423): n is a, c, g, or t
  Coding DNA Sequence Number=SeqID_5311
gccaccacactcacatagcatagattatgtaagtagaaccataaagtaagtttccacaactatccacaaaccctcctcacacaccccaccctcgccccgcccacatggtgtggtggtgngcgttcgctgtcaatatgcgcaagagagccgagcacgctacgcctcacaccccaatgacccacatccaccctaaggatttaatacaccatctaaacagcaccaattaacgcgtagtcgccattattcgatttgcagtcaggtattgtcggctccacacccggtgaatagcacgtacaatgtcggtgtatactggtcgtcagaaagtggacgcaacataccaaaattactcctccctcagaacgctgtctactctattattcatctacaccactacatacgctactaggtagtatctgtcttccnacgcctgggagttaatggtgagttatgatgcgtgtatgtcgcgtgagttgacttt

SEQ ID NO: 15091 - DNA, 160 bp, Glycine max
  Coding DNA Sequence Number=SeqID_5312
cagctagaattgtggactgcaatggtgtctgttctacaccaaagggtaaaaggttcagaataccagaagtgctaacatgtccaccagctcctaagaagagaagagtaacatcatgctcatcatccaagaacaagagatccccgatagcattttttgcttc

SEQ ID NO: 15092 - DNA, 517 bp, Glycine max
  Coding DNA Sequence Number=SeqID_5313
gcagccgctcggaatggcagcagcagcagccctcgccatgtggcttcaccgtcccttttcgcacccgcgtcttccaccaccctcgacctgcccccctacagctcctctgctttctttcaggtgcccaggttttctcctgggcatgaagccattgggctgtgatgtgtgaggtgcacggagcaaaaaaagagggaggggacctccattcctctaatctgggagatggcccctaaagttatggagcaaaaggattacgatttcaaggcagatatttggttgtttggcattactgcacttgaacttgctattggccatgcaccattttctatccaacctccagcaaaggtttttctcatgacgttgcaacatgcccctccataacttcataacacaaaggagaagaagttttcagacgtatggtttcaaaaatattttctaagaaattaattgtgtgtgactattgaatcatttcttgtcttgttttgtagtcttttaagagtctgattgccacttgcaa

SEQ ID NO: 15093 - DNA, 387 bp, Glycine max
  misc_feature (166)..(166): n is a, c, g, or t
  Coding DNA Sequence Number=SeqID_5314
tctccctctcttatttcagagaaaaaaataaacaagaaaatggaggtgtcgacaagaaagccttatttcatagaagaagaagacgacggattggtttctctagctgagatggaagctggagtttcttctccttcttcttgttacacaaacatgaaccagtaccatngtcgtagttattacaataattaccatcagtactctgtttcatcacccagatctgttgtcgtctctgaaaaattccatgacttcagattcgacaacagctgtttcggacaacaatcagttcctcatttcttggactcttgtttcctctgtaagaagcgtcttggtcataacaaagacatcttcatgtacagaggagacacaccgttctgtagcgaggagtgt

SEQ ID NO: 15094 - DNA, 589 bp, Glycine max
  misc_feature (85)..(85): n is a, c, g, or t
  misc_feature (126)..(126): n is a, c, g, or t
  misc_feature (233)..(233): n is a, c, g, or t
  misc_feature (529)..(529): n is a, c, g, or t
  Coding DNA Sequence Number=SeqID_5315
atcgtcgacgttatgtaattcagccgaacttccgaatatgacacttgtcgcagagttggcaccttaggctcatggagcgaaactntgtctacacgctctgtgtcccgccgtccggaattcctcctntgagtagggtgtgttgtcggacactatggttcagtttattatgcacgtagttcatgagcactcaactgacagacaagtgcatcgcggtcaggatctttctcgctgcntcagcacattcatttcgctagatattacatgacacgcgccgtccaagaacagactctgcgcgaacgtactcgttttgtagctgtgtcatagagactcatggataccagcacgacgcgcgctgcacaaggtcggttacgagcagcagtacgtcatccacactcactacgcgagtggtcctccatactcctcgtcggacattgaacatgcgttgctctgcgctaattctagctaagagctcattatgaggctactgatgtgtggtcactcggccacactgcgcgatggtctgcatttnatactatgtataacgcgcgtaccacctgtcagaagatatgcggagtcgttcagtctctca

SEQ ID NO: 15095 - DNA, 499 bp, Glycine max
  misc_feature (27)..(27): n is a, c, g, or t
  misc_feature (270)..(270): n is a, c, g, or t
  misc_feature (277)..(277): n is a, c, g, or t
  misc_feature (308)..(308): n is a, c, g, or t
  misc_feature (383)..(383): n is a, c, g, or t
  Coding DNA Sequence Number=SeqID_5316
gcgacactgccgtggtatgttatgaanatagcagatgaatagtacacgtgaaatgcgccgactgtacgacgtagtctctatactagttgtcgactggttgatatagatagataatgagagtacaatataatattatatatgtatttgatgtatagcgagtgcagcgagacgaagtagcgcgccgcacgcgtctcggcgcagccgacaggcgtggagagcggctgtgcttattactgtcgtgttatgtacctgactgccgaccgcaccgcncgcacgnatcgcgcgcagcacgcctcagctggacggcnctagcgatacattggatcgtagataaatggcggacagacaagtcgactccacttagatcatagtatacatgactncgctcgtatacgttcgccgctttgcctctcgtcctgtgcacttgatagaccagactctgcacatactgcgtcacgagcgtgaagcgcgacgtggaggcgagacatacacatgcccc

SEQ ID NO: 15096 - DNA, 516 bp, Glycine max
  misc_feature (311)..(311): n is a, c, g, or t
  misc_feature (376)..(376): n is a, c, g, or t
  Coding DNA Sequence Number=SeqID_5317
gtttgttggaccgaatacccctctggggggcgggaattttttctctcaaatggcccccccggggggggttcgccccccccggaaaaaacccccccagcctcggtttttttgggttcccgcccccccctccccgggggtcccttcccgcgggggttttgccgcccaggaaccccccggaggaaattcaccccccctccaaaaaaacccattcgtaaaaagttaaaggcaaaatggacccccggcggcccccccccgaaattttgtacaaaagggccccccttttcccgcccttccccggaacagagcctcgncttgggggcaggtggtttttttaaaacccccacggcacagttgcgcgcggctgttgattcgcaanttgcaggccacaacaggggcggtgaacagccacggccaggcacccgccaggctgctgctgctgctgctcgccatggccaccgtacgctgtagctagctagcttagctggtactgttgctcaccctcgcaaggacggtaca

SEQ ID NO: 15097 - DNA, 172 bp, Glycine max
  Coding DNA Sequence Number=SeqID_5318
tggtcggatggaaccatgctgtttttgttctaactggctatggaagaggcatagttccactggattacactgctatggtcgttgcttttataaaaactggtttgccttatggatttggtgcattatacaagggtcttgtgcccaactttgtaaaggcggtcctatcaatagc

SEQ ID NO: 15098 - DNA, 532 bp, Glycine max
  misc_feature (133)..(133): n is a, c, g, or t
  misc_feature (193)..(193): n is a, c, g, or t
  misc_feature (362)..(362): n is a, c, g, or t
  misc_feature (373)..(373): n is a, c, g, or t
  misc_feature (427)..(427): n is a, c, g, or t
  Coding DNA Sequence Number=SeqID_5319
acgccgctacatcaattcagcatatgcatctcctctccacgagcacccactcacctacactcgcagatgttgcgacgaacacctcatctgctcgtcgatcacacgacacatctctatagcctgacgtctcaanctgcgcacatacaggattacgactacgtcgtcgcgactaatacagtcatctacagccatnatgctcacgaactcaactacacaatggtacggtaacacacgcactctacttctacatcatgtatatagacgccgtacatgattatgtcaaatctgtgagaacaccatctactaactcctcaatgcataacatctcacactatataacttcatctcgcatcgtcacactnctctcgtatanaacgtactacttacaacacgatatcgacatttacgataagatcactcacaacancagtcactcatacatgtgcacgcatgaacggacgcccacatacatgcacctcagtccacgagttcattaatatatgcttctgtgctaccgcttcgtaaatgaacg

SEQ ID NO: 15099 - DNA, 569 bp, Glycine max
  Coding DNA Sequence Number=SeqID_5320
ggacagctagcttcatagacggcatcgaagggtcttatgctcgtaaagccaactaatacgaacgcattcagatttggagcataatgctggttgttatctagagcatgattggtcttgctatgtatcgtgaggaataatgtgaaaattactaggcggacgagactccgcagatcaaaacgcgtgttcaattcgagctcgattcgctttcgatgtctacgtctaatgccctcttgagagcgccttcagaggctcgcaagatattttcggcactctggggcgagcaccccaatgtggcaactataatggctagcttaacactgccctcacattctgcgagaacttgatcaagaacctcgtcatcttcgactcttatagcactaggtgacttgacggcggcgcggacaactcggcgtgctctgtctcgtagcttctcgtttgacatcttgaggtcaaccatcttctcacagttagctgtcctgcaagcacttcacaagctcgaagaccacttaccaagttcccataggttttgccggcgcggacctgcgagcccgtcgagatcatgttcaaga

SEQ ID NO: 15100 - DNA, 487 bp, Glycine max
  misc_feature (27)..(27): n is a, c, g, or t
  misc_feature (262)..(262): n is a, c, g, or t
  misc_feature (303)..(303): n is a, c, g, or t
  misc_feature (313)..(314): n is a, c, g, or t
  misc_feature (363)..(363): n is a, c, g, or t
  misc_feature (368)..(368): n is a, c, g, or t
  misc_feature (423)..(423): n is a, c, g, or t
  Coding DNA Sequence Number=SeqID_5321
accccatatctacagacatttcacgancaggcgcacatttgtactccgcattagggattgtacgagggcgtgtggaggtagtgtcgcccccgtatgtctgcgtggaagcgcgcccggctgttcaggcggcctccgtcacacggcgcgtctcagtaacataataaatatttaacggacgaaagaatggtcacgaccaatatttatatatctccacttgttttagtatactctccggttggtgtgacgacactcgggtgcgggnttctcgtggtgatgctgggtgtttgtgtgatctgtgtatcntttatctacnnccctcattttgtatcctgatacgtgattataaacaagtcatacccacancatgncgattcacagtatggagagcacataatatgtatcttagatagagaggggggggcngcatagcctagaaccaagaagttctctagcagtatggaggggtgcgcttcctcacatacactat

SEQ ID NO: 15101 - DNA, 513 bp, Glycine max
  Coding DNA Sequence Number=SeqID_5322
caagccaaaattattgaccccaccttaacaaatgagcaagttgaagaagtttgcaacgatccagagggcgcaggaagactcttggcaaacaagatgcttggtacaggacatgtcagactcaagaatgctgttgctgacatccaagataaatacaaagacattagaaaattagaaaagagtgttgaaacaattcatcaaatgtttattgatatgcaratgcttgtgcaggctcaaggcgaaatgcttgataatattgaattaaatattcaagaagcccatgactacacaaagaaggccaacgttcagctcgccaaagccaaaaagagccatttgatttacaaaaagtataaatgctgcatcttgatcacactgctcatcgttattgttattataattgtcgtccctattgtcactcggtaattggctcctgattcattcaatttgttgtgaaaactggaaaacattttttttatcatgtatgttttttatatgtcattattctcgattttcctc

SEQ ID NO: 15102 - DNA, 141 bp, Glycine max
  misc_feature (106)..(106): n is a, c, g, or t
  Coding DNA Sequence Number=SeqID_5323
agcaatggcagcgtccgagtgcagcaccgccttcgtcttgctcgtcctggtcacggtgccggcggcggcggcggcggccctgttgcacccgggggaggggggaagnggggaacgccgcgccgaccccccacgggctctggt

SEQ ID NO: 15103 - DNA, 534 bp, Glycine max
  misc_feature (104)..(104): n is a, c, g, or t
  misc_feature (136)..(136): n is a, c, g, or t
  misc_feature (158)..(159): n is a, c, g, or t
  misc_feature (163)..(163): n is a, c, g, or t
  misc_feature (174)..(174): n is a, c, g, or t
  misc_feature (381)..(381): n is a, c, g, or t
  misc_feature (417)..(417): n is a, c, g, or t
  Coding DNA Sequence Number=SeqID_5324
cgcgcgtggcagtgtgtactatagagaacacacgacgccgccgcgcagaacgacgtctcgccgtttcggctatatcatacctgtagctgtgtcagcgtcagctnatattatggtgcgagttcatgtgctactacanatcaaatcgcgcactatcgcgnntgtnctgctacgaanctagacatcaccagctctccatctctccgccaccacagtgtatacttatctacgcatcaccagagtcctatgcagcacacaaatagaaaatacgggaagtcgtaggagtcgatgtaatacatacacaactcacgaatacatcctgccggcgtggggtgctcgttcttattcttcattatatatactatatctcgtccgggaccacgnatatcactctactcctaccgccctctcacaccgacntctctactatctctatcttacaccgtgacggccgatcaatagtctacataaactaaaacgctgcgtgtgggtcgccatacggtcgctacagtatacaactgatatgctctctggtcc

SEQ ID NO: 15104 - DNA, 557 bp, Glycine max
  misc_feature (133)..(133): n is a, c, g, or t
  Coding DNA Sequence Number=SeqID_5325
tgcgcatgttccctcagctatactctcacctagtcattacaaagtaatatcaccaaaatccaacgtccacacccaagatagagaggaaaacccacaccaaaaaagaaagccggtaggccacatgtaagaatcnctctttaaactaactaatttctttctttcatatttatttgattatataccaccaacctccacaatctacacaacaggtatacaccatcaacgaggagagcaaaccacacacaccaacacggggcacccagctcgtagccagcactaacccccaaggttcttgtatccaaaaataacactatcaaccaaccaccaccataaagaagaaaaaacagaaatgagtgcacccattctctaaagtagcggtgggatgtgatggacgcgaaggtagttttggttgtgtttctaccactacccatcacctttctttgcgtctcttttatggggggggggtggcgcggggtcccaactaccattccctatatccaaaaataaaaggaggaacctcacaaaataacacccctcgagagaggtggagctttgtt

SEQ ID NO: 15105 - DNA, 489 bp, Glycine max
  Coding DNA Sequence Number=SeqID_5326
aagggcagcgccaagatggccgactggaagagcgcttcgtctgtgtacgacttcagcgtcaaggacatcactggcgccgacgtcagcctagacaagtacaagggccacgttctgctgatcgtcaacatcgcctcgctgtgcgggctgacggccaccaactacaaggagctcgtcgagctggacgagaagtaccgcgagcgcgggctgcgcatcctcgccttcccctgcaaccagttcaacggccaggagcccggcacggccgacgacatcgtgtgcttcgccaagaagcagaacgccaactttgacctgttcgagaaggtgaacgtcaacggcgacgacgccagccccctctggaagtacctgaagaacaagcagggcggcaccttcggagacttcatcaagtggaacttcaccaagttcatcgtccgacaaggagggccagccccgtggagcgacacagccccactacggagccacacaaactgatct

SEQ ID NO: 15106 - DNA, 403 bp, Glycine max
  misc_feature (94)..(94): n is a, c, g, or t
  Coding DNA Sequence Number=SeqID_5327
aagatcggtcagtcagtaccacgcgcgccgccggcgacgaccaatttctccgcgcgcggggatggcggccgcggcgggccccacgaggctggcngtacttcgatgacatgtgggccctccgcgcccccgccaccgtcctctccatccatcatcaggaggagggcggccggcgagcggtggtgctggacgctaccgtcttccacccgcagggcggcgggcagccggccgacacgggcgccatcgtctccgcgtccggcgccggcgccaggttcctcgtcaaggacggggtggtcttccactatggcagatttgaggacgctgccggagaggaggagctcagccaagggcagagcgtcagcttggaagtcgacgcggaacggcgcaagctcaactccaggcttca

SEQ ID NO: 15107 - DNA, 346 bp, Glycine max
  Coding DNA Sequence Number=SeqID_5328
ggacgagagtattgcacttttagaaagaatgggagtgtactctggtcctgagcgttacacatttgagcacatgcccattgatgcaatgagagggccaatatttaatgcccgccgttcttgaattgatatgttatagatgctgtgcattttggtcgagtggttcatttgttggcagctaaaaaaattcaggcttcagccgctaactttcaaagatgcgccttttggccgtaatcgagtgagtttcgtggaatatccccccaatgctgcccaatttgcactgtgtagccaccgaatgtgacagtgtatatatatatatacacagttcctgacacggactttggtgaga

SEQ ID NO: 15108 - DNA, 450 bp, Glycine max
  misc_feature (29)..(29): n is a, c, g, or t
  misc_feature (33)..(33): n is a, c, g, or t
  misc_feature (48)..(48): n is a, c, g, or t
  misc_feature (66)..(66): n is a, c, g, or t
  misc_feature (90)..(90): n is a, c, g, or t
  misc_feature (98)..(98): n is a, c, g, or t
  misc_feature (101)..(101): n is a, c, g, or t
  misc_feature (110)..(110): n is a, c, g, or t
  misc_feature (116)..(116): n is a, c, g, or t
  misc_feature (125)..(125): n is a, c, g, or t
  misc_feature (145)..(145): n is a, c, g, or t
  misc_feature (147)..(147): n is a, c, g, or t
  misc_feature (165)..(165): n is a, c, g, or t
  misc_feature (180)..(180): n is a, c, g, or t
  misc_feature (199)..(199): n is a, c, g, or t
  misc_feature (230)..(230): n is a, c, g, or t
  misc_feature (241)..(241): n is a, c, g, or t
  misc_feature (281)..(281): n is a, c, g, or t
  misc_feature (291)..(291): n is a, c, g, or t
  misc_feature (297)..(297): n is a, c, g, or t
  misc_feature (301)..(301): n is a, c, g, or t
  misc_feature (331)..(331): n is a, c, g, or t
  misc_feature (358)..(358): n is a, c, g, or t
  misc_feature (399)..(399): n is a, c, g, or t
  misc_feature (407)..(407): n is a, c, g, or t
  misc_feature (412)..(412): n is a, c, g, or t
  misc_feature (423)..(423): n is a, c, g, or t
  misc_feature (425)..(425): n is a, c, g, or t
  Coding DNA Sequence Number=SeqID_5329
gacgcgtcgtgcgtactcgcatcgtcgtngcantctcggtagtacgtncttaatgatagactactngcgacaggtgtgatagttgtgtgncgaccctnctntctagcatnattctntacgtgcgnattagtgagtttatgagatngngatgtatgtcttctggtnttcatgagtcgctgnatgcactcgcacccagtanagaaacgtcactcgcgttgattgtttttagngtgagagacangcgcgtgttctctggtgcgtcgatcgacgcgtaggcctgnctcagagagnagaganaaanagatacagcatagaatgatagtagcatctncctctctcctacgtcctctctgcgtgngtgaattgttcgtgggtgagttctgtgtatggtatggggtngtctctgnctctntctcgtccgcngngtgaggactgctctcctccttattt

SEQ ID NO: 15109 - DNA, 589 bp, Glycine max
  misc_feature (130)..(130): n is a, c, g, or t
  misc_feature (206)..(206): n is a, c, g, or t
  misc_feature (226)..(226): n is a, c, g, or t
  misc_feature (228)..(228): n is a, c, g, or t
  misc_feature (281)..(281): n is a, c, g, or t
  misc_feature (294)..(294): n is a, c, g, or t
  misc_feature (301)..(301): n is a, c, g, or t
  misc_feature (338)..(338): n is a, c, g, or t
  misc_feature (380)..(380): n is a, c, g, or t
  misc_feature (458)..(458): n is a, c, g, or t
  Coding DNA Sequence Number=SeqID_5330
tacatgctccagtacagctcataattagttatattatgcatggtacgcgcgcgcaagacagcgcaccacgtatgatgacagagtaatgggaatatgtagcgacagaagcgcacatagacgagacactcgngcgtcgagacacgtgagatcgcgattgcggcccgcgcctcctcacttgcgcagtctgtgtggtcgcgaccacgccncgtagcactgacgtcgagcncncaagtagctgtgattgtgcacgtgaggtgtgcgtggcgtctacgtgaagatgngagcgagcagagncaccagncgaagagcgacgatgcgatagtacgtcagtatacagnaatgtgccagaagggcgtgagcgcgatgcatgatctcgtaanacactctcagtaacaagtgactactcgtatgtcatcgctctactgcatgatagttgtatcgtgtgctgcaacgacggngatgagatacaatgtacatgtacaggccgtgcgacgcggcgctacaggcacacgactaatagcgacgtgtcacacgtagcgcacagaatacgattatcaataactagactgacacgcactctagtataacg

SEQ ID NO: 15110 - DNA, 368 bp, Glycine max
  Coding DNA Sequence Number=SeqID_5331
taggtgcttcgaatacaatggtgtggatccaattcgaatactatgtggtggttttgccggaaaaccatgctggaatagaacactacagtacgtgtccgtgttggaggcgggctcaagtgcctctacatgatcgcgttaacagacaagtagcgatctatatgttacgttcagcacacttgacaccgtcattgaattagtttatgtctactgccatgcctatatatggcatcgcggatcggaggccattctcacatggcgagtgtaaggttcaccgagtcagagaccgtgtacagggatagcggtaatttgatatggatctattgctagaggtggaggatgtgtagcaggtgatcacaagctatatttat

SEQ ID NO: 15111 - DNA, 181 bp, Glycine max
  misc_feature (64)..(64): n is a, c, g, or t
  Coding DNA Sequence Number=SeqID_5332
catttgtataattctctgactagggtaatttccatttatggactgaaaagttaaaaactacttnccagtattttcttgatctgcatctattctagaatattcttccattctgccatttttacattttcttgcatatctccagctgattattattgcaatgtatgcaggtcttcttctctgg

SEQ ID NO: 15112 - DNA, 298 bp, Glycine max
  Coding DNA Sequence Number=SeqID_5333
gccggccaatgtaggaagatccagcaggtaagaatcagcaagagaagttcatcaccggacctctatctgtactcatgatgagtgttgcaaataatactcaggtactgatacactgtcggtacaacacaaagcttctgggtcgtgtaagggcttttgacaggcactgcaacatggttcttgaaaatgtcagggagatgtggtctgagggtaccaaagactaggtaaaccaaagcatgaagtacccaagccagtctaaccagcgataaatgtcaccagcgagagatgtttcgccagtgaa

SEQ ID NO: 15113 - DNA, 156 bp, Glycine max
  Coding DNA Sequence Number=SeqID_5334
tctcgtgcagtccttcatcgatggtgaaggaagaagttcattcacgcgtcagggttccatggtgtacacaaagaggccttcaagaaagtctcggttgaaaagaaggtttgacacgagaaaaggacagaaagatgagtctgtcatattgaaggagca

SEQ ID NO: 15114 - DNA, 341 bp, Glycine max
  Coding DNA Sequence Number=SeqID_5335
ttcggcaccaggcttcgaaaagcttagctgcttaaaagggccaatgacgtatgaaaaactcgcgaaggcccacctggagaggatcatgtccactaatggactatcggagactggggatgagaatagcttcgaaaagccttagctgctttataagtgccaatgacccatgaaaaactgccatgatgtgtgagtggcgaaacattcgcagcaacgatccgaataaaaagcgatccactggatctcatgctaactcaaaaatgatccatcggataaccgttacctataccgttttttattgctggatcttaacgatatttctgattaggtaccgatccaagaac

SEQ ID NO: 15115 - DNA, 541 bp, Glycine max
  Coding DNA Sequence Number=SeqID_5336
aggcattttggatagcactggtaacatcaaataccaaaagaaaggtggtttattcggaaataaaaagaagaatgaacagcatcttattggattcgaagttgatgaagaagctgaagaaaatgaagaagatacctctcacgttcaacctcaaagaggtcaaagacaaaacaactttggaaattactttgctcaacaacaacctagagatgaagttgaaatcgaagtcaaggatagaaagtttgatagactttatgctcctttagaagaagactatgaagaaaactacgaagatgaagatatagtcagcccttaagcaatatgctatgatgatgattattaatttcaattttgctcttttctgaagaacaatctcaaggatcatttttttaagaaagaaggctctatttgatatgtaattttaactgtgaaaaagaaagagagttatttgatattgataaatcatttgatacctgataagtaattatatttgaaacatttttatgacaaactgaatatgatctataattctagttattccaac

SEQ ID NO: 15116 - DNA, 590 bp, Glycine max
  misc_feature (166)..(166): n is a, c, g, or t
  misc_feature (295)..(295): n is a, c, g, or t
  misc_feature (319)..(319): n is a, c, g, or t
  misc_feature (357)..(357): n is a, c, g, or t
  misc_feature (359)..(359): n is a, c, g, or t
  misc_feature (414)..(414): n is a, c, g, or t
  misc_feature (548)..(548): n is a, c, g, or t
  Coding DNA Sequence Number=SeqID_5337
tagtctcggttgcattgtatcgcagacggtagatgagtgcgcgtctaccacacacacaactacacgcataatgtgacgatccttgtcacgttctgcggcttatcgcgctcaacccgtgtaagaatgatagtgagatctcacgcgagagcgcgcagagagagagagncgcgtcgaggtgcacctgcaccgcgcgttcacgtcactgagctcacgaccgcgcagcttcatctctatcgccccatacctcactcgctacgcactctgccacagacttcagcgatgtgagcgagtatangagagacgagcgacgcgcagcctncaccactactaagacacgggccagcagcggcgtagctncncgctagataatcatactatagtgtgataggtctcttcatatgttatatagctagngttgtacaatgagtgacataatacagctctccagtacacatcacacacagcataccctcacactctgcagtgcgctctgctgctgtcacatatacgcactcactctcgatcctagtactcttaggtggtgtatngatgtatacatagtgatgatgctacaatatatgctgccttat

SEQ ID NO: 15117 - DNA, 188 bp, Glycine max
  Coding DNA Sequence Number=SeqID_5338
cccctgagcatggttattatctaaaatggagtcaacagtcagcttgggaaatgaaccatataagtactggttcttcttggaaagagattgttgaaccagtgatgagattgtatactgaggcaacaaatggctcctatatagagaccaaagagagtgccttggtatggcactactatgatgctgatcct

SEQ ID NO: 15118 - DNA, 198 bp, Glycine max
  Coding DNA Sequence Number=SeqID_5339
agccaacccactgctcgaggaaaagaagatggcgagccaaggaccacggtcaaccccatggagcaacagacgacaatcataacagagaaatcaccgccgatgaaaagatgccggaatctaagattcatcgggacgataggtagaagtggagtgagcgcaaacgctgtagaagccacggtgacacgttcaacaggtaaa

SEQ ID NO: 15119 - DNA, 566 bp, Glycine max
  misc_feature (110)..(110): n is a, c, g, or t
  misc_feature (374)..(374): n is a, c, g, or t
  misc_feature (479)..(479): n is a, c, g, or t
  misc_feature (527)..(527): n is a, c, g, or t
  Coding DNA Sequence Number=SeqID_5340
taaatttctccgacctctctattatctcatatattaaaccaacaacacatatccctctctcattcattatacttgaatttgatgataatctacacaaccacatcctctcncaagagcaggcctgggatatacacaaatatgatgccatctcatctgatcatgcatattctatcgttagacacgcagaagaaaacatcctcgacgcagcacgcacagacgatggttagatacatatctctagatcaatgtcgagagcccgctacaccacccatcttaatcattagacctgtccttctccacatgaacgagctatcactatttatatatgaatataacataaacttagtgtatcataacatactataatattatanttactatactctgccgctagtattatattagttcttactatatacaagttccatccctcgcctgtctctatcgtgttatctacttgtatgatggaacgtctgtgntccctgtcgttcctctcgcatgcgaaccatgacccgcctaccgacgcngtacgtgcgtaccttgccgctgcagatctctctatatat

SEQ ID NO: 15120 - DNA, 320 bp, Glycine max
  Coding DNA Sequence Number=SeqID_5341
acgagtctccctgagcccgtgtattcacttttgccatccctttcaacttggggccaaaagggccgtggtattttttaattccttaatggctctgggggggccaggatcctattcatgtgcccaaattgtgagagttacactttccacagtgtttctgccttcaccatgttcctgtacttttgggatgcaatggggaggcccccagtagaaaaggggtccaacttattccttgaggttctttccttggagggtgctttacaacccaatttattaatattataactttacacagttaatttcacaagtgtcccaaagggact

SEQ ID NO: 15121 - DNA, 449 bp, Glycine max
  Coding DNA Sequence Number=SeqID_5342
gtacatcaatagtcaacagggtccttataaaggtcccattgacatcaaagtctttagcgagctagacaatgtcagagatgcaaagatgtattttagcaaaaaagacatgatgtcaatagagaatttaaagcttggcatcacaggttatgaaaaagaaagcaagaagcaatctgctgcacagaaggctcaaaatcaattaaaaatgtcagagagtatgtctaagttcaattttagcagacaagaaactgaagaagccgaatcaagagactcaagaggctcaactgactccttaccaagtcctattaaggcaagatctgatttacctcccttgaagaaactacctgagaagctaaagtctgaggtaagctcaactcttcaggatttcccaaatactggtgaatcacctttattaatgaaggatataaaggctaatgcctcaatgggcccaa

SEQ ID NO: 15122 - DNA, 510 bp, Glycine max
  Coding DNA Sequence Number=SeqID_5343
ttctcagcatactagctctctccgtcactctctctccctctcagccactctcacgcaccacacgtagcgatctctcataattattgtagatccacggaaacaataagtaagcaaatcaagaatgtcctgcgagctataatgaaagtaagcaaagaatatttgaagttccatgactataatctagagggctcggtggaaatcaaatggagatggtttaagaattcgattggagcacttgatgggatacatattccggtaacagttactgcagaagataggcctagatatcataatagaaaaggtgatatctttacaaatgttttaggagcttgcggtccaaatttaaggtttatatatgtgttgcctgggtgggaagggtcagcaggagattctcgagtattgtgagatgctttgcatcgtcaaaattgtctccatattccaaatggtaaatattttcttgtggatgcggggtatacaaatggccctggatttttaacaccttattgaagg

SEQ ID NO: 15123 - DNA, 592 bp, Glycine max
  misc_feature (147)..(147): n is a, c, g, or t
  misc_feature (393)..(393): n is a, c, g, or t
  misc_feature (439)..(439): n is a, c, g, or t
  misc_feature (478)..(478): n is a, c, g, or t
  misc_feature (542)..(542): n is a, c, g, or t
  misc_feature (557)..(557): n is a, c, g, or t
  Coding DNA Sequence Number=SeqID_5344
agagcttacttcgtggcaccgctaggatcgctacaaggaagtgacttattgcgtaggatcgcttgactgagcaggtatatagacacatcgatgtgctatcgcagccgtcctgcttgcacgacaccactcgccgcacgtgtagctaanagactttcgccgtcgattatatgatttgcgctctgcgctgacggagtgcatggagtacacggcacacatagacaatgcgcgttgcatgtaatcagcggattgactggctggctggcgacacgatagatcatgcagatcaagacacagaactgtagagagaagactgccggcacaggctgctacttcttttagctactgcagaagagtcatgagacagtcaagagagatccgtgagagaacgagganatacaatacatacagagatctcctcgctccgcgcgcgcgcgcgccncaggagcgacactccgcatcacataatcttgatgagacncggcgcgcgcccgtctactattcgtgagatggagtatattctcatgctcgtataacaggagtgngaagatatgtgtttnaacgcatcatgtcagcatatcatcatcgactcatt

SEQ ID NO: 15124 - DNA, 540 bp, Glycine max
  misc_feature (207)..(207): n is a, c, g, or t
  misc_feature (210)..(210): n is a, c, g, or t
  misc_feature (297)..(297): n is a, c, g, or t
  misc_feature (365)..(365): n is a, c, g, or t
  misc_feature (420)..(420): n is a, c, g, or t
  misc_feature (433)..(433): n is a, c, g, or t
  misc_feature (494)..(494): n is a, c, g, or t
  Coding DNA Sequence Number=SeqID_5345
taacacgtcactctgttgatgctctcctgtgcggaatatagagcgcgtagcgctcgatactgtgccgtgtgcgcgtgtgctactggctgcagaccgggtgtagcaagagtagtgcgacagcgacgacgagacaagtgacatgagtctatgcgtcgagcatccacacatagcaagctcgcgacacatcgacctgctagcgcggtctanctnacacatagctatctgacagacgtgtgcatcgagacacgctaggtctggtgctcatgtggactagtactgtcttatacacgttgatcntgttgcgtctaggtgccatagagtcatagcagcgacggcaggacgtgagcaggatctgaacgagaganagactaacaacactctactctgcaccagacgagacactcgtacaacagtatccgncgctacacacgcnagccgtcgctcggcagctgcgagcgctatcttagtctctcgtctcgctcgctatctttatnacactttagagagtatgacgcgatcagtacgatctacagcattgta

SEQ ID NO: 15125 - DNA, 575 bp, Glycine max
  misc_feature (151)..(151): n is a, c, g, or t
  misc_feature (250)..(250): n is a, c, g, or t
  misc_feature (257)..(257): n is a, c, g, or t
  misc_feature (282)..(282): n is a, c, g, or t
  misc_feature (304)..(304): n is a, c, g, or t
  misc_feature (349)..(349): n is a, c, g, or t
  misc_feature (392)..(392): n is a, c, g, or t
  misc_feature (435)..(435): n is a, c, g, or t
  misc_feature (490)..(490): n is a, c, g, or t
  misc_feature (514)..(514): n is a, c, g, or t
  Coding DNA Sequence Number=SeqID_5346
gaatgtgctttgtgtgatttatactgtcagatacatatatgagaggtgtacgcgacgtctggggcgatacccggcgcacctcacatacttctcactcagtcattgtacgtactgtgtcctgcgcgttatatactgtttaaatatataatantgcgcgcggcgcggtgataaaatatcacgcaccgtgcgtctgcgtactacaatatgttatatatataacactgctgctaatctacggcgcgtctccacnatatatnttatatacaatatatgatagcgttngttaaaaagaacatcgtatgtnatgacgtgtctgcgcatgcagcgtctcacataatatatacagtcngcagagatgaacgcgtgctgagaaaccgaaaaacgcgctgctntgtgtgcgcgtgactgtgtggcatgtctccgcacgacgtaaantatcacatatcagcactatctgctcacgcgccgccgcgcggcgaaacaaatatgngctatacaacgtcgtggcgcgtcngcgctcgcatacacccgatatatagtttacatctatgtcgagatctcgtcacggataccaa

SEQ ID NO: 15126 - DNA, 456 bp, Glycine max
  misc_feature (184)..(184): n is a, c, g, or t
  misc_feature (212)..(212): n is a, c, g, or t
  misc_feature (232)..(232): n is a, c, g, or t
  misc_feature (234)..(234): n is a, c, g, or t
  misc_feature (250)..(250): n is a, c, g, or t
  misc_feature (297)..(297): n is a, c, g, or t
  misc_feature (345)..(345): n is a, c, g, or t
  misc_feature (357)..(357): n is a, c, g, or t
  misc_feature (359)..(359): n is a, c, g, or t
  misc_feature (362)..(362): n is a, c, g, or t
  Coding DNA Sequence Number=SeqID_5347
attagtgctggtgtacgcatgacgttcgatgactactatatgtacgtgtctctagcgccgccgtgtaggctcagagcgagcgtaatactcgctgattatagaaagacaatccgacgaaccgctaacataggatgccgttcaggagcaaggcagcggcatatccgcactgactgtggagatgtanctcattgagcgtgactactacggttcgntgtcaagattcgttgctgtngngcagacgtgttatgtngaatgtgtaatatagagataagatatgactgaacgatatgagatatnttatctatattgcttgtcgatgctgcttcgcgcgtatgcgcgatacanccactacaccgnancancgactcacccgacagagacagctgagcatatgctcagctcgtctatatctctatctgttgggtgatatcacttacgtctctggatgtgctgtgg

SEQ ID NO: 15127 - DNA, 196 bp, Glycine max
  misc_feature (121)..(121): n is a, c, g, or t
  misc_feature (145)..(145): n is a, c, g, or t
  misc_feature (147)..(147): n is a, c, g, or t
  Coding DNA Sequence Number=SeqID_5348
aaggatatggtactgccaggtcccattgcacggcaattagttcatctggtttggatcactacccttgctctgtgaacctgaatctctatgtgcacaagatgcaaaggactcagtgctgaanattgaaacgcactttcaatgtttnantctattcttttgttgcctcggtaaaatgagaaggacgtagcacacggac

SEQ ID NO: 15128 - DNA, 462 bp, Glycine max
  Coding DNA Sequence Number=SeqID_5349
gggtcctcgactacctccagacgaggcgccccttctgtcagccgtaccacctattcaccgcccagcacggttacccaacctatgccataaaggtcccctgagggcgccaagctactattttttgcccccggcgaccggacttatatccggagttcctggtgccccgaagatgcgtactgacccgcgccttccttagacatccccgcggggcccgccaccccccccccctaagattggggcctcccttagcgcacctatggagcgcccccccgcccatctccccgagagggatctttcttccgcgagggcgtaggggacaacctttcgagcaccatcgtaccacaaacttctcccctttttcccccccctacaccccccgtatttcctccccaatgttagccccccaaattccgccgtttcccccctctccgcccaactccgggtttatacataccctctcga

SEQ ID NO: 15129 - DNA, 288 bp, Glycine max
  Coding DNA Sequence Number=SeqID_5350
cgtatccgcggcagtgcttgtgtcgcctctaccccacgccctagtcgccgagggccccttccccactctccctgccgtcgccttatgtcgtggttgctggccgcctgatctgccgtgtcttgctcttggacacacgagcctggccgccccggtgaccgtgcttgctgcttctaccccgctacctgtgccctgcgcctgctgttttccctccatctgtggatatgtcttacttattttcgaattgggtccttcatatctcaattttatcagtgcgcttgcctaataatc

SEQ ID NO: 15130 - DNA, 553 bp, Glycine max
  misc_feature (136)..(136): n is a, c, g, or t
  misc_feature (138)..(138): n is a, c, g, or t
  misc_feature (169)..(169): n is a, c, g, or t
  misc_feature (212)..(212): n is a, c, g, or t
  misc_feature (219)..(219): n is a, c, g, or t
  misc_feature (250)..(250): n is a, c, g, or t
  misc_feature (266)..(266): n is a, c, g, or t
  misc_feature (315)..(315): n is a, c, g, or t
  misc_feature (366)..(367): n is a, c, g, or t
  misc_feature (375)..(375): n is a, c, g, or t
  misc_feature (430)..(430): n is a, c, g, or t
  misc_feature (456)..(456): n is a, c, g, or t
  misc_feature (474)..(474): n is a, c, g, or t
  misc_feature (489)..(489): n is a, c, g, or t
  Coding DNA Sequence Number=SeqID_5351
gacggctaggcgataatcgcgtcgatcgacttctgtactatgacgtcacgataagcagaatatcactgcgcagagactgcggcgcgtcgtcgttgataaggcacaggcgatgatcgtcgagcgtcgagacgaatgncnactctacatcgatagagtactacgacgtatncattgcgctcgttcgaatgtagtatactcattcgctgtatgangtgcgtnatgtcgcttgcgcgcgtcgcgtcgcgcacantatgatagtcggcgcnctcgcgcgcatcgacgtcccgtgtctgctgcgcggttgcatacacgatnacataagcgtgcggcgcactgcacctctacactttcgcggctatcggcgannctctctanacgcctgtactgtgtatatcggccgtgcgcgatcgcgtcgtccggtgcatcatgntgcgttccgcgccgcgcgcgcgccgntgtgcgcgacggacgcgntgtgcccgcatgctncgtgtcgcttgtctctacatcccgaattgactgtgtccagcaggagactctgccgcaaagactc

SEQ ID NO: 15131 - DNA, 527 bp, Glycine max
  misc_feature (41)..(41): n is a, c, g, or t
  misc_feature (45)..(46): n is a, c, g, or t
  misc_feature (51)..(51): n is a, c, g, or t
  misc_feature (55)..(55): n is a, c, g, or t
  misc_feature (58)..(58): n is a, c, g, or t
  misc_feature (66)..(66): n is a, c, g, or t
  misc_feature (69)..(69): n is a, c, g, or t
  misc_feature (78)..(78): n is a, c, g, or t
  misc_feature (172)..(172): n is a, c, g, or t
  misc_feature (181)..(181): n is a, c, g, or t
  misc_feature (215)..(215): n is a, c, g, or t
  misc_feature (222)..(222): n is a, c, g, or t
  misc_feature (259)..(259): n is a, c, g, or t
  misc_feature (285)..(285): n is a, c, g, or t
  misc_feature (289)..(289): n is a, c, g, or t
  misc_feature (299)..(299): n is a, c, g, or t
  misc_feature (301)..(301): n is a, c, g, or t
  misc_feature (317)..(317): n is a, c, g, or t
  misc_feature (335)..(335): n is a, c, g, or t
  misc_feature (357)..(358): n is a, c, g, or t
  misc_feature (389)..(389): n is a, c, g, or t
  misc_feature (396)..(397): n is a, c, g, or t
  misc_feature (414)..(414): n is a, c, g, or t
  misc_feature (464)..(464): n is a, c, g, or t
  misc_feature (466)..(466): n is a, c, g, or t
  Coding DNA Sequence Number=SeqID_5352
gatatgcatagagtatcacgaatatagcatgtgaggcgttnagtnnttgtntttnttncggatctntcnctacttatntttatgtctcagattatattcagtaacagcactgaacagagtgcgccgagagagctctagagtgcggactgcatgtgagtgtccactgagctgnttgctacgncacataagtagacataatattaatgacatagagntgtagtnaatatgttgtgtgttggtaattgtatatgagtgcgcngaggtagatgatgtgggaatgcggtngcgngcatagtgtntngtgtgtgaggtcgttngttgtgaagtgagcgtcnatatgagaaatactatatttgnntcgcgtgcatacaagaatatgagtaagaccncagatcnntataataatatattatntaaagaaggcgagtaggagagtaggagcgaatagagtcgagtgcgtgtantnagcgaggtagcaaatgagcaagcggctgtgcgcttagtaatgtgtacagtcagctatggtg

SEQ ID NO: 15132 - DNA, 189 bp, Glycine max
  Coding DNA Sequence Number=SeqID_5353
gtcggctgccggttccccggagagcctccgtgccctggccggccacactggagtctctggctccgcttcgtgtgctggtcttgggcccgcttccgcgggctcgcgtcactgtggcttcggcctcctcgacgcttgcggatcctgcggccaggtcccggggcgcgctggccatcgccacgggcctcgagg

SEQ ID NO: 15133 - DNA, 587 bp, Glycine max
  Coding DNA Sequence Number=SeqID_5354
attaagtgagaagcacgcagtccgtgttcttttcaaagagggatggggagcttattgctgcagcagagctttattgcagggcgtggaagaagatattgtagaaagtcgcctctcgttttgaattctccgcagtgggcattcaccatgttgacatgatgctgttgatgttgagcgaggcttgttggagttgaggaagctgagtatagaacaacaactttgggaagcatcacggaagggaatggagcagcttcaagggtcagcaaatgctaatcataagcatgccactgactctgatgcctcatcctgtttgtctgagccctttagttcttaattgattctttgtcctatatgtatatttttgtctttgttttctacacaagttttccaattctgtaaacatttcaaaacactgtattcgggaatacaaagaaacgcaagaatcttttacgttgcacgaagaccatagtgggttgtaataattaacaaactacataagactgggaatttccctatccttacctcccactggccctactgccggtcggatgagcaactctcttcggcggcctggtttgttccctattctt

SEQ ID NO: 15134 - DNA, 506 bp, Glycine max
  misc_feature (149)..(149): n is a, c, g, or t
  misc_feature (160)..(160): n is a, c, g, or t
  misc_feature (283)..(283): n is a, c, g, or t
  misc_feature (307)..(307): n is a, c, g, or t
  misc_feature (320)..(320): n is a, c, g, or t
  misc_feature (420)..(420): n is a, c, g, or t
  misc_feature (435)..(435): n is a, c, g, or t
  misc_feature (476)..(476): n is a, c, g, or t
  Coding DNA Sequence Number=SeqID_5355
gtctcttgcattgcggttcgatgtcgtggtgtcgtcagtatcgtgcgtggctgcgcgaggcgtagcgtgcgctcgctatctcacttatcacgacgatcgtgtagtttctctgcggctatttgactcaatgaccgctttacgctcacggnactcgtcgcgnacacgtgatctctgcgtatggtctgcgacacggcgcacggtgccgtgcgcgagccggaggcgcgcgagagattccggagcgaggcgtgctatgttcgctgatgcagcaggtcgttgagttagngttcgggagtgagacgtagagctnacgtatggcgctnggcgcatcgctgccagtgttgtgtagcggcgacgaggtactggagactgtagtggagagatgatgagcgcagagacgggcgcagcattctgcacgtctcntgcaagatggcgcgnggtgcgatggtgggtgctgtagcggcgctgtagactgaganaattcggacacgacatgaagcagggactat

SEQ ID NO: 15135 - DNA, 178 bp, Glycine max
  Coding DNA Sequence Number=SeqID_5356
atgtgggcgcgggatctcgccactcgagaatgcactttgaatcgcaactcccgaaaggaagcccccccaaaaaatgggttctcccttgcccccagctcacttacgctccccgaaaatttatctagtctgaagatcttctgttctctctctctcattgctcgggaatcactctgttccc

SEQ ID NO: 15136 - DNA, 533 bp, Glycine max
  misc_feature (110)..(110): n is a, c, g, or t
  misc_feature (223)..(224): n is a, c, g, or t
  misc_feature (260)..(260): n is a, c, g, or t
  misc_feature (499)..(499): n is a, c, g, or t
  Coding DNA Sequence Number=SeqID_5357
tgggagaggcccaccggttactatttaataaggttgggacttttttgttgtccaaaaggtgaaagaacgaaccggtccaagccacctatgctaggggtctagtttgcttngggagttaaatagagggggtgatggggcacaatttgtcggtcattagtgggatttaaaaaaagatgggaggcgtgtagtttggcctaactggtgttgaggcgccgaaagtgtnnacgagaatagttaacggcgggtacgaatgttccgantgggcaagggaagtggtgagagaggacttgattatggagcggcgttgaatagtaagctggtggtaggggagtaaatggtagtcgtgatagttaacacaggatacaaaacggggtatcgtgagctttgtccctgtgatggcgggtccctttcagggagcttggttataggtgggggggtaggggttcatctttcgagcgtagcgcaagcgtcactgttttcagagtcactggcagctatnccaacagatcagtgtactcttggaatggtgattt

SEQ ID NO: 15137 - DNA, 581 bp, Glycine max
  misc_feature (135)..(135): n is a, c, g, or t
  misc_feature (248)..(248): n is a, c, g, or t
  misc_feature (253)..(253): n is a, c, g, or t
  misc_feature (408)..(408): n is a, c, g, or t
  Coding DNA Sequence Number=SeqID_5358
aagcgtccattaagtcaacaccaattgtaggttttaaccatcacacaagctatatgctcttgcacgtgatctaaaaatatcagcttgtgcgtgtaacttaagccaaacgaccacaggatcagaacaacaatctcnattcaaatgatgcaaatacaacaaaagatgtgttgtgcggcgcagtgggaatggagagatgaatatgcataggtcgatagtattgttttacttagaattcctaagaagtacgngcggnacatgcgagtagaataataatacgggtgaagagacactcactactagtggtgcgtgataatgctgaggacctattcccacgacgaatagcgcgcttctttgctcatatataattacgtccgactctaattcgcacggcgtagtggatgggtatanatagagaagagtgtgattgcagaagtgtttcacctgcctgtgtcatgcggggctgggtggtgatgaggagccccactctaccaaacatgaaatagcccgtccccgcgcggcgagaggagcgcgaaagcatattgtataatagagagaggggcgactagccctgacaactaata

SEQ ID NO: 15138 - DNA, 520 bp, Glycine max
  Coding DNA Sequence Number=SeqID_5359
actactcattgattataaggctgcgtcggagatgaactagaagaccgcacgcgcgtgacatgtgacgcgcggagacttctactatgtttacagttatacacagggtgggcatataattgacgagggaggagaggtagattattccgggtggtgttgaatgtgagttcgaattagactagattcatgttgtgtgaattagaatattcagcaagttccggttacagaacatagcgagatgacagatagaaataagacgatggaataatagagggtaggactatctatcgttggatcgtgttctctgtctttgacaagacactgggcagaagagaggcgagggtgggcgggtccggcaggatgacaacgagcgcgagctatgggtggtgccgggtcgagcggtgtgtgcgacgacggtgtcggccaggatcatacagtcaaaagaagaatcttgatgtggagggggtgatgctcattcgtgagctgacctacgagtgaggagacaccagttatttcagttttg

SEQ ID NO: 15139 - DNA, 537 bp, Glycine max
  misc_feature (28)..(28): n is a, c, g, or t
  misc_feature (226)..(226): n is a, c, g, or t
  misc_feature (249)..(249): n is a, c, g, or t
  misc_feature (327)..(327): n is a, c, g, or t
  misc_feature (440)..(440): n is a, c, g, or t
  misc_feature (459)..(459): n is a, c, g, or t
  misc_feature (489)..(489): n is a, c, g, or t
  Coding DNA Sequence Number=SeqID_5360
gcggaggaccacattactaagctacatntatatctatatagaatactctagacgtgagtgtacgagataagcatcgactttcgatcacaggccgggacgatctatatctactccgctactactaattgctaccactacggcatatactccacggagagtagagcgactggtcggccgctctcgacagaaagcgtgatactgtggtattctagaactgagtacaaancagtagtgtactatatacatatnactaagatgtgcctatatattgacatatatctatggagaatatattggatctatatagtcttatattctttgtctatnctactttctttgttctcatttaatattccattttctattctctcctctcgacactcccctgatttatctaacagaacgacatacaatctatacagaccaataacttcgcgatntatgatgttcgccacggangcaaaaataccactctattatatctaattngatgacccctgcacagactactggttcgacaacactgacaatctagct

SEQ ID NO: 15140 - DNA, 476 bp, Glycine max
  misc_feature (74)..(74): n is a, c, g, or t
  misc_feature (254)..(254): n is a, c, g, or t
  misc_feature (256)..(256): n is a, c, g, or t
  misc_feature (281)..(281): n is a, c, g, or t
  misc_feature (424)..(424): n is a, c, g, or t
  Coding DNA Sequence Number=SeqID_5361
gatatgcaaaagacgcacctcgcgaacaccacaccacatcacctaatatcgtcacacaccaaccagactgcccntcactctcgtcacacggcacatctctacttcacatcatcatcgctatactcgcctacccgcatctcagtcagccagcgtaacattatgatacattcaatatacgccattcatcatacttccacatatacgagaatattacagagacgtgcgccgtacggttgctctccgacactcactanangcatcgctatattcacacttctccntactcgtctatcttcatccacgttatacactaatctacgtctgcatgagactcgtggcgatagtattgatacgactagaatgtaatctactcagacgtatgaatacacacactcacacacttctatgtagctatgaaagtcgntgtctcataccatgcatcgcgctaagtaatatcgtactagacgctcgcgcgg

SEQ ID NO: 15141 - DNA, 415 bp, Glycine max
  misc_feature (172)..(172): n is a, c, g, or t
  misc_feature (195)..(195): n is a, c, g, or t
  misc_feature (244)..(244): n is a, c, g, or t
  misc_feature (370)..(370): n is a, c, g, or t
  misc_feature (372)..(372): n is a, c, g, or t
  Coding DNA Sequence Number=SeqID_5362
agagtgcgtgacacggagtgcatctgtgacgtaggtgcgccgagcgcaggcggtcggccgaggcggtgggcgagaggcgtgcggggtgtgcgcgggaagcgccgcggagcgtcgtgacaagagggtcatatagatctatccgacgcgccctcactctcgcgttgagcggcgnagagcgaacacacgaccaccacncaaccacccaagctcggatgcaatctcaccaccacacacaaccactccntcagaacacaatacacaccacaccacacctctacactacatctatatattaaatcttatatatcactacgcatctcaactcagtgtgatacaaccatcacagagtgattaatgctatatgtgtttntnatttattttaatggggtgagggagttggtagtggtgcgcggcc

SEQ ID NO: 15142 - DNA, 437 bp, Glycine max
  misc_feature (97)..(97): n is a, c, g, or t
  misc_feature (231)..(231): n is a, c, g, or t
  Coding DNA Sequence Number=SeqID_5363
gaattatatgcttctcatgcgtctgagtatgatatctcctttgaaaagtatgtagagatcaaagaagatgtctccaagatggtagatttctccgagngtatcccaaccgtcagagggcctaggacagccgtcttctgggacgccgtggattgccctttccctccttcttcctctcctgatgcgatctaccaatctatctcatcagctcttgctgaaaggtgttttagtganaatgttactatctgggcctatcttgatgatgctgacaagaaagggtctgccttactgggtggtgacaagacgtgggcttccagaatctactttcttcccggaggggataaagcctcgagacgtatcagaatgttaaatgacatgtttttatgggcaagggactctcctcggggcatgcgttatgaagctagtttggtcctgttcgc

SEQ ID NO: 15143 - DNA, 516 bp, Glycine max
  misc_feature (48)..(48): n is a, c, g, or t
  misc_feature (75)..(75): n is a, c, g, or t
  misc_feature (117)..(117): n is a, c, g, or t
  misc_feature (287)..(287): n is a, c, g, or t
  Coding DNA Sequence Number=SeqID_5364
actaggtgtgcaactaagtctccttacgactagtgtactcgccgcganaacgaacagaccacatgacaatgttangtatactataactatatgtactacttaatatattcactaccntcacttactgagatcatctacaaacacaagacatcatacaaggaacatatcaacacgcatataccatcttatcatccactctatcagaacaaatatgctcacatccactcacactgcgctctagtctcggcgagtgagtatctgtctgtagctaccgaactgtagtctgnttggcgacgaaggctaggcgacgcaccctacacaaacacagagcgacctgctctcgacgaacagcacacctccacaccatatgactcctccttccactcctaggtaacgcgcatatctcgctcgtgacagagagaagcagaatctacatacatcaactgcctctattatggcacacagacaaaagaagagcgacttctctcgaaatataaatcgtactcgaccgcgcgg

SEQ ID NO: 15144 - DNA, 555 bp, Glycine max
  misc_feature (354)..(354): n is a, c, g, or t
  misc_feature (383)..(383): n is a, c, g, or t
  misc_feature (458)..(458): n is a, c, g, or t
  misc_feature (463)..(463): n is a, c, g, or t
  Coding DNA Sequence Number=SeqID_5365
cagggacagatttgccatgcgattttaggcgatgcttgttgtctatttatcgatttattgatgtagttggccagagtttgcgcattattggtacttgatcacacatttcagtgattttcaactggcgtgtttgggaagtttctttctacatgaaggtgttttcttcttgtctggacttcccttcatatggcttgagagggcagggtggatgagcaagtacaaaattcaggccaaaaataacacccctgctgctcaggagaaatgtattgttcgcctgttgctttaccattttggtgtcaatctacctgttatggttttttcatatcccgtcttcaaatacatggacatgcagantagttgtcccctaccgtcctagaaagtanttctaatttcaatagtctttgacttcattttagaagactttatattctactagagacatacaatactacgcacanaatangtatacaaacatatacacaatattcatcatgaatatacctcccgccattgatctactgctagatatctgatgctactaaaatacttggcctt

SEQ ID NO: 15145 - DNA, 473 bp, Glycine max
  misc_feature (55)..(55): n is a, c, g, or t
  misc_feature (270)..(270): n is a, c, g, or t
  misc_feature (322)..(322): n is a, c, g, or t
  misc_feature (377)..(377): n is a, c, g, or t
  misc_feature (381)..(381): n is a, c, g, or t
  misc_feature (400)..(400): n is a, c, g, or t
  misc_feature (425)..(425): n is a, c, g, or t
  Coding DNA Sequence Number=SeqID_5366
acgtgagggcagacgcacgactgtcgtagtgagtggcgcgcaggatgccacttancttcgccagacacaccacacgacacagctgacttccaaaactattcttgcggagtgccgtcgcgttcgtcggctcttcgtcacgccgctccgctctccgctccgacggtcagtcaggaatgtgtatgtgcctcattacatattattctgcatcttctctttctgttctcttctcgtctatctggtcgttcacgtatgtctatagcatacggccgngatctcacaacacagtcatactcacatgtctgctcagacgtggtgagctatnttctacctaccttatttatatatgatgttctaccgtagacactattggagcagtngagntgataaatccgctatacanaactcgatacaagagagagatagcnctacgcatcccacggtagatagagactgcgtaccttcagcagtgtgtg

SEQ ID NO: 15146 - DNA, 450 bp, Glycine max
  misc_feature (38)..(38): n is a, c, g, or t
  misc_feature (45)..(45): n is a, c, g, or t
  misc_feature (169)..(170): n is a, c, g, or t
  misc_feature (201)..(201): n is a, c, g, or t
  misc_feature (342)..(342): n is a, c, g, or t
  misc_feature (344)..(344): n is a, c, g, or t
  misc_feature (374)..(374): n is a, c, g, or t
  misc_feature (400)..(400): n is a, c, g, or t
  misc_feature (406)..(406): n is a, c, g, or t
  Coding DNA Sequence Number=SeqID_5367
tttctgctagtcgtcggaggtgctgtctgtgcccagtngccttgnggtgcgtctcagtagtgtgtgtgcgcatggagagcgaagcagagacgagacccgacacgaacacacgaccaacgaaccgacaccccagacagacgcaacccatcactacacgcgcgacagacanngagagtagagaggtagcagagaagagctcangtgttggtgcgagatcgtaagaaggtggctcctgtgagcgcgacgtctgagcgcgtgtctatccgctggagattgaagacgcagacggctcgtctaacatccatagtgcatctcatcacacagcgtcatcatattacacancnttctcccgattgctagtacatgatcgatgnttgcgtctcacaacaagtagcttatncatcgnaacaatgtatcccggcacaatatcaaccttctacgaccacatgt

SEQ ID NO: 15147 - DNA, 553 bp, Glycine max
  Coding DNA Sequence Number=SeqID_5368
aagatctccaacagctcggagctgaatatgtccttgaacaaggtattttcagaagcaccaaagcacctctccctaatggtagttgggaagtcaacgagactgtgagcgttttcaaaaaggataattgcggaaccaccatttacaacttcacggtcatcttgagatgtatctctgagactaaacttgtcagagctcgttacctcatctcctataaccgcaaaaatttcaacgctcttgtcacttggttcatttacactgatatcactccagatggagacaatttcgctatttctgacttaccttcattcattgatgtcagagacctcaacgattctgacagtccatatcaagagtatttggaccaaggccttaactataccgttgctaatgctacctccaatggcttattgccagaaggcgactacagagttgctagagtctttagcatcaaggataccggcttctcttatccctatggttaccgatacttggtgaagttagctaatgatgataatggaaagtattaccgcgccttgatcactgtttggaacac

SEQ ID NO: 15148 - DNA, 471 bp, Glycine max
  Coding DNA Sequence Number=SeqID_5369
gtttacgcgtctgattttattctattcctctgttcctctgacaccatatgacggccactcggcttatgtgagacaatgacttttctaacgacagaggcatttgtctaaacacaaggattggtatgcttaaaccgaatgcgtgcttcgtgtcaaactaacgttacctttacgaattaatattagcaattatagtactctaaaaaaaatgtgattccacctgaaaaaatacgaacaaccgagtgcaaaactaaaaacaacctaagtgcaaaatatgattccctcccgaagaaaaccaggcccccttgtcctcccccctagacactatgtcaccccccgaaaaaaagggcatcaggggaaaaaaaaactaatgtcaagggtaataacgatcgatcggccatgcagtaagtgttggccaccccatccaaggacgtgcttacaacctgccctgacgcttttccctctgggtgggaa

SEQ ID NO: 15149 - DNA, 564 bp, Glycine max
  misc_feature (242)..(242): n is a, c, g, or t
  misc_feature (519)..(519): n is a, c, g, or t
  Coding DNA Sequence Number=SeqID_5370
agacaacgccgccatctaatactattctcgctcgcgtccgggcccgcattcctcactcaactctctcttctttaacaccaaccagtgcctctctcgcgcttggtcgacacattcatgcgaaagcgcgctcatctgccgcgccgtgcacataacagtcctcgcaacctgcgcgccgtggtataccgaacacaaccgcgcagcaccaccgattacgtctttgcaaggattgcatatgaatgtgngagagacacctcgcccttagtgggaccaagagaaatcatatcagcctacagtaaaagtgacgtatcgcatagtgatggtggtggccgatgtcggcacgtccgtcccgcagtcacacgccgtgctcgtgcagttcgttagcgcgcggcggctgtgctgtgcgtatgtgacagtgtctgttcatatctcactatacgcactcgcctcttatgtataagagcgtggaggtgggagtctctaccacactgaattattaattatgtggtgcgtgtcgcgctntcgcttatctcgatatgtaccttacattgtagttcctattcgtca

SEQ ID NO: 15150 - DNA, 321 bp, Glycine max
  Coding DNA Sequence Number=SeqID_5371
gattcaacagtctttggctgtctccgcttttaacaccaaacagacatccgagagctgagaaaaaacgcaaccatggagggaggggtctcctacactcgcatgcacttgtgtcaaaatccgcgagctgaaggacgactacgccaagttcgagctccgcgacaccgacgcgagtgtagccaacgcgctgcggcgcctgaagatcgcagatgtgccgacgactgactagaacctgagggtgatcgaggtaaaatgcgctgtgctcaacgacgagttcatctggcacaggctcggccatattatgctcacgagcgagcgcgccat

SEQ ID NO: 15151 - DNA, 425 bp, Glycine max
  misc_feature (44)..(44): n is a, c, g, or t
  misc_feature (250)..(251): n is a, c, g, or t
  misc_feature (254)..(257): n is a, c, g, or t
  misc_feature (357)..(357): n is a, c, g, or t
  misc_feature (390)..(391): n is a, c, g, or t
  Coding DNA Sequence Number=SeqID_5372
gattcaagacctactcaaggatacgaagctcctgaatccagcangaattacactacccaagagaagtggaatctttggtgatatgatcagcacttggcaaaacagatcagtccaaaatgaagacaatcaacatcgtcacactactgaaactcatgctgtaaacgaccatacaaacaatgatatgatgggaatgcctttcatgaacttttggaaacccaaagattcttccaaagagccgctgtcagatttnncgnnnncgtgagctatggtggaagctccacaggattcagaagaaaggaatcctttgatttattctaggtgatgtgaggaattacttctgggaagaatgaaaaaggngcccatcttaccaatagcctttattaattcacnngaagaaactcttgttactcatttatttcctgatg

SEQ ID NO: 15152 - DNA, 595 bp, Glycine max
  misc_feature (56)..(56): n is a, c, g, or t
  misc_feature (59)..(59): n is a, c, g, or t
  misc_feature (68)..(68): n is a, c, g, or t
  misc_feature (75)..(75): n is a, c, g, or t
  misc_feature (87)..(88): n is a, c, g, or t
  misc_feature (95)..(96): n is a, c, g, or t
  misc_feature (98)..(98): n is a, c, g, or t
  misc_feature (100)..(100): n is a, c, g, or t
  misc_feature (125)..(125): n is a, c, g, or t
  misc_feature (134)..(134): n is a, c, g, or t
  misc_feature (145)..(145): n is a, c, g, or t
  misc_feature (186)..(186): n is a, c, g, or t
  misc_feature (201)..(202): n is a, c, g, or t
  misc_feature (204)..(204): n is a, c, g, or t
  misc_feature (240)..(240): n is a, c, g, or t
  misc_feature (249)..(249): n is a, c, g, or t
  misc_feature (273)..(273): n is a, c, g, or t
  misc_feature (290)..(290): n is a, c, g, or t
  misc_feature (304)..(304): n is a, c, g, or t
  misc_feature (314)..(314): n is a, c, g, or t
  misc_feature (318)..(318): n is a, c, g, or t
  misc_feature (324)..(324): n is a, c, g, or t
  misc_feature (327)..(327): n is a, c, g, or t
  misc_feature (330)..(330): n is a, c, g, or t
  misc_feature (345)..(345): n is a, c, g, or t
  misc_feature (348)..(348): n is a, c, g, or t
  misc_feature (365)..(365): n is a, c, g, or t
  misc_feature (392)..(392): n is a, c, g, or t
  misc_feature (401)..(401): n is a, c, g, or t
  misc_feature (403)..(403): n is a, c, g, or t
  misc_feature (415)..(415): n is a, c, g, or t
  misc_feature (420)..(420): n is a, c, g, or t
  misc_feature (436)..(436): n is a, c, g, or t
  misc_feature (438)..(438): n is a, c, g, or t
  misc_feature (468)..(468): n is a, c, g, or t
  misc_feature (479)..(479): n is a, c, g, or t
  misc_feature (485)..(485): n is a, c, g, or t
  misc_feature (488)..(489): n is a, c, g, or t
  misc_feature (503)..(503): n is a, c, g, or t
  misc_feature (532)..(532): n is a, c, g, or t
  misc_feature (552)..(552): n is a, c, g, or t
  misc_feature (560)..(560): n is a, c, g, or t
  Coding DNA Sequence Number=SeqID_5373
cgatcatcgtgcagcgtatctgtttgcgatgcgcgctagttcagctggtcgacctngtncacgtacantatcgtngtcatccctacnnatatgcnnantnatactatatactaacctcacttganctgcattantcgatgatagnatgtatcatcatctacactatccctatcatgagatcatctncgtgcacatgctgcnnantacgatacgttgcataaacgtcccgctacgtgtacngtccatganatgaactactcgtattccgacganctgccagtccatgcgcnatcatcaattcgantatgatgcgncagngcattngcngtngatcctgacactgtncgncatatgatgactttcgntcgatgtcagtcgatctgctgtgccgntcgtatctncngcgtagcatcancatantacactgctgcatgtnanatgagtcactactgactacacgaagcacancagtacgactncgatcntcnntatatctaatgatngatcgaatcgacagcgtcatgatcacacnccgatatcatctggatatantccgtaantgatttatctgcgagctgacgacatcccgtcgcag

SEQ ID NO: 15153 - DNA, 217 bp, Glycine max
  Coding DNA Sequence Number=SeqID_5374
gggtttgcccaggatacatctgctaggtagaaaccccgtgtggggtggtctgttcaatctattttgttatatccgattaacgattatagatgttttttgacacccctagtacatggtttttatatgaaataatggatcgtgactagtcctaactatgagcaaagtttttgtctttctttacctcatcctttccaaatccctttccattgttttcagt

SEQ ID NO: 15154 - DNA, 317 bp, Glycine max
  misc_feature (221)..(221): n is a, c, g, or t
  misc_feature (239)..(239): n is a, c, g, or t
  misc_feature (260)..(260): n is a, c, g, or t
  misc_feature (273)..(273): n is a, c, g, or t
  Coding DNA Sequence Number=SeqID_5375
acaactgcgcacacggcggcggcggcggcggcagcagcagcagccatgtacaccagcacctgctccgcggccgacgagcgcgtgtactgcccggagtgccgccgcgcgacggaggttgtcctggaccacggcacaggcgacaccatctgcaccgagtgcgcgctcgtcctcgacgcgcactacatcgacgagggttccgagtggcgcaacttcgccgacgncggcggcggcgaccgacngcgaccccagccgcgtcggcncctctggcgactncttcctcaacaccaagctctccaccgtcatcgactacaccaaca

SEQ ID NO: 15155 - DNA, 526 bp, Glycine max
  misc_feature (26)..(26): n is a, c, g, or t
  misc_feature (131)..(131): n is a, c, g, or t
  misc_feature (192)..(192): n is a, c, g, or t
  misc_feature (269)..(269): n is a, c, g, or t
  misc_feature (380)..(380): n is a, c, g, or t
  misc_feature (470)..(470): n is a, c, g, or t
  misc_feature (473)..(473): n is a, c, g, or t
  Coding DNA Sequence Number=SeqID_5376
caccctcccgtatggctgaatgatanattgtatagaacaatacagatagaacgcggtgttctggcgctatatcccgtcttaatatacccgccgacacggtgtgtattacattctaccacacgctctctgcntcgcgcgtcgccgcaggcacataacatgtatatcagcaccacgttaccgcgctgttacagnccgcagctcatcccctcatatctatcctcattatgtaaagatataacacgcgcacacaaccaaccgcgccacacgcntatacggttcctgtgtgcactgacgctgcgcacgcaagacgttattaccgttatcctcttctacgtagtaacacatgattgccctcctctactccgcccctcacttatatnacatccacaccccgcgctacacgcagctagcggcaattaacatcgacatatactcgaactagatacggcagcaggtgtgtcgactgccancgnctgctcacctgtcgcgtgctgccgacgtgacgtccgtacgtctcggagaagat

SEQ ID NO: 15156 - DNA, 597 bp, Glycine max
  misc_feature (231)..(231): n is a, c, g, or t
  misc_feature (350)..(350): n is a, c, g, or t
  misc_feature (530)..(530): n is a, c, g, or t
  misc_feature (558)..(558): n is a, c, g, or t
  misc_feature (568)..(568): n is a, c, g, or t
  Coding DNA Sequence Number=SeqID_5377
tataccacttctcgactctacacatgactgcgctagtaactatctcacgcgctcactcctacaagtgatgtcacctcgatcgtccctcatactgcgtatacgtctacgacacacgatatacactcaatacaaacattcgatgtcatctagccgtagctatcatgcgtactgtctatgttgtgcaccctccactcctcacacacactcacgcatctacgtctagtggattancatgcctacctcgccgcaccgaagcgcgtagaccgcgcgataatattgacgatagtgaagaacgtaatagataatatcacacagaataaataatacatgagacgtatgagatcaaccancaacgaagaactatatagtattaatactctcatccatccgacattacacatcaatcactcgacacacacacctcatacatatcttagcgatactacatattcatctatatatctgatctatatatatcatatgatctacatatatctctatatgctggtatatacacatctatagcacanatgtaactcgatacatcaagcctcgtcntatcgcgatntatagatatacgacttctaacacacatca

SEQ ID NO: 15157 - DNA, 532 bp, Glycine max
  Coding DNA Sequence Number=SeqID_5378
gggccgcttgaggtttggtatctatcgctcccctcgaattcaaactgccgtaactctccactcggtcgtccggtccgggcgtttcacacggcgggccgctccgggcgcatcatcggtcgcgcgcctcgaaaccgaacggtcagacctcttaacacgtccgtctggttccaacttttcacacggctggccgctagaaatttaaaatcgatcgctcccctcgaattcaaacgtccgtaactcttcccacgggcataagatattgacgcgtaggacatagatccactccagctgcatcaaaattcgagtggctaaaactccaacgtccgaagctctctacaagtttatacgatcccggcgacacactcaattgaacgacacaggccctccagaaagtcaaatgggaataaccttccactaggaggtacgattcaacgcccaataattttttgggacgcacggaacttgacaacggaacctttcgagaaattcaaatggtcattatcttccacaccggaggttcgatataggcgca

SEQ ID NO: 15158 - DNA, 563 bp, Glycine max
  Coding DNA Sequence Number=SeqID_5379
agcagcacctcttgaagcagagacaatgaggctgcaaacgcaactactcatcttggcttccatcactgcagcgatgatcatgagccacgacgtcctcgccggcaccacccacgcgataccagtgcgcacgttaggcggcgtcgaggaggacgacgtgggcttcgcggagcgcgaggaggaggcatacccgcggaggagggtgctttacggcgaccagtacatcagctacaaaggggtgcaggcgagcaggccggcgtgccccggctcctgcgctggccgggggcagccctacaccggtagcggctgccaggccatcttcggctgccgcgggcgttaattatcttatctagcaggtactaccattcctatttgcttccctggctaagaagctgcgtggagattatgaaatgtgggttatatatgtatttgtgttgttggacgtgatgattctccggtcttaatagtaatttttyttyttggctggtgtttcattgtgctaagatagcgctytaccgtttccttagccttgtcagtgtttacgtgacttgtactataatccttat

SEQ ID NO: 15159 - DNA, 359 bp, Glycine max
  Coding DNA Sequence Number=SeqID_5380
aacattctaatgagtatcctccccttggtcgttgagctgtgagggacatgcgtcaaacatgtggctgtaggagtcatcaagagtgttgagaagaaagagaccgccggaggcaaggtccacaaggtcgttaccaagaagaagtgatctcatatgggcaattttcatagcacatgtgatcatcatagtggttactcctgaatagtagttttatcctctcagagtattaggtgtttggaataaggtatatttctaagtttctttcgatctcacgtagccgtagctttcaaaactaggttcttgatcggcggtggtcaataatcatgactgattctttgtgatgagtactgtttctcgttttg

SEQ ID NO: 15160 - DNA, 573 bp, Glycine max
  misc_feature (71)..(72): n is a, c, g, or t
  misc_feature (77)..(77): n is a, c, g, or t
  misc_feature (85)..(85): n is a, c, g, or t
  misc_feature (88)..(88): n is a, c, g, or t
  misc_feature (170)..(170): n is a, c, g, or t
  misc_feature (227)..(227): n is a, c, g, or t
  misc_feature (313)..(313): n is a, c, g, or t
  Coding DNA Sequence Number=SeqID_5381
atgtcgacatgcactgatcacacacgaacatgagctctccgagcgctcgtctgattatattattacacacnncaacnagacaacntgnacaaaagatcatatcacatatagatcgcaccgagacgcatgccatcaacttaacgtacgcatcgactgcgcgcgcagtatanagctgcactacataccctgccgatatattgtcgtattatatcgaagataagcgtatntagacacacatgcactcgctcgcatataacatcgaagtcaatccgacatacattcacgactctcgccttatattatcgcaccacgnctatatatgcatcgtactgacgatgtcctgtatcatctatcgcctgtcctacgctacacacgcacataaggacgaaaggatgtagtatagtatgagatagataacacgacacatttgaagttgcaactatgtctctgagacccgaatagacgcaatatgtgtgcgcgggtgcacaacggacatatcatcaactagaagatgacgaattgaacatacgtagatgcgcgtacgcttcgtcgacactaacacgagactccatt

SEQ ID NO: 15161 - DNA, 554 bp, Glycine max
  misc_feature (356)..(356): n is a, c, g, or t
  misc_feature (407)..(407): n is a, c, g, or t
  Coding DNA Sequence Number=SeqID_5382
ggacgcataggtcacttaatgttctcgtatactattctatcgtatgtgacactactgtatattaattggtgtgagagttgtgttatgtatatatccgggaggtgatgaccgcgcagcgcctcgcgctgtgcgcgttcctccgcctcgtataatctagttctctgcggtcccgccactctctcgatctccaatctactatcgccactcacccgacgttgggcaatgcgtatctcacgcccacccacccaccagcacgcggggcgccgaatcgtcacgctacctcttacgaggtaactaactgagataatctattgcggtggcctcgacatggcattataacctgtggtgtggcggcntcgttactcctctcaacacacatcacacactatctctgctgagctcgcgcnctgcgagtgtgctgcgtcttgcgtgagttggtgtataattaagaattcagtctaccacactcgaccatgcgcgctcttgtgttgtgagcgccttctaatttatagatatagtatacgacctcgcgtgcatggtctacgatcgtgact

SEQ ID NO: 15162 - DNA, 502 bp, Glycine max
  Coding DNA Sequence Number=SeqID_5383
gaacagaagagctcgctggaaaacaaagcagcttgagaaagattatgatacacttaaacgacagtttgattcccttaaagctgaaaacgatcatcttcaaactcacaaccagaaactccaagctgagataatgagttcaaggaacagagaacaaacagaatcaataaatctgaacaaagaaacagaaggatcttgcagtaacagaagcgacaacagttccgataatttcaggctggacatctcgacggctgtgccatcagtagacagcacaataacaggcggccatccaccagcgccacagactgttggtcgacacttctttccaccagcgaccgcgacgaccaccacaacgactatgcaattctttcaaaactcgtcttctggtcagagtatggttaaagaagaaaacagtatcagtaacatgttctgtgcaatggatgaccactcaggtttttggccatggcttgatcagcaacagtacaactgaaactggtcgacctgt

SEQ ID NO: 15163 - DNA, 573 bp, Glycine max
  Coding DNA Sequence Number=SeqID_5384
cagtgtgtgtttgttatgggacttattatggaagtgactgtagtgttttttgtcagccttccgtaaattgttctaataatggtgattgtaaggcagatggaacttgtaattgtggagaaaattattacggagataattgtgaattcacttattgtcccggaaattgcagtggaaatggaatctgtaataattcaacgggagtgtgttcttgcagtgaaaattatttttcaccctcgtgtgaaaattattgcgttgctagtaccacttgtagtggacaaggagattgcagtaataacggaatttgcgaatgttataataattattatggaaataattgtctctctttctgtgattcccaaaccacatgcagcaatcacggaacatgtgtagagatacaaaacagagagagaaaagaaagaggagagagagaagagatagaaagtggagtagaatgccaatgtgattttaattatcataatttggattgtagtgtttattgtaatgatacaataacctgcagcggccatgggacatgcaacaacactggagtgtgcgaatgtaccggagaatatt

SEQ ID NO: 15164 - DNA, 444 bp, Glycine max
  Coding DNA Sequence Number=SeqID_5385
aggccggtttggtcgctgagattcaaaacaagacaatctcggaagcaacagagattctggttaagcagctggatcagttgaaagcagaggagaagcttttgaagaaacagaggaaagaagagaaggcaaaagctaaagcgttgaagatgatgactgaaatggactctgaatcttcttcttcgtctgaatcaagtgacagtgattgtggcaaggggaaggttgttgacatgagctctttgagaaacaacgctaaaccggttcttgagcctttacaaccagaatctagcgtagcaacccttcctagaaaccaacaagattcttgcaagaacaccacgggtgaagcattgaagctcgctctgctggaatcagctgctgcaaccacagcctttccctcagttgttaatcctggattgccattgaagacggtggaagcagttcctgttg

SEQ ID NO: 15165 - DNA, 508 bp, Glycine max
  misc_feature (31)..(31): n is a, c, g, or t
  misc_feature (114)..(114): n is a, c, g, or t
  misc_feature (169)..(169): n is a, c, g, or t
  misc_feature (452)..(452): n is a, c, g, or t
  misc_feature (480)..(480): n is a, c, g, or t
  Coding DNA Sequence Number=SeqID_5386
gctgacgacgaaatcgcgtgactgtagcaanagtgtctgcagtgagtgtgctaactacgcagttaacggttgtcatctgtaatctaagccgatgtgggtgtcctcacacgcagncgcgcggcgggacatctgatagacacagcgatccataccgtcatgctgcgcgagntgtggtccgccacgcgagccatcccactatagttctgtatttatcatcaacaatatgaatacgcatacgtgtgcgatcgctgtaatataatctatgtctgatgatgtgtggaggtctagagagcgcacgtaatcctagtaataccgtattatcgtgagagataatatcatgtcacgtacatatctagcgcatccgctgcgcgcgagttataaccgattccgacatgtttcgtttactaacgcgcgacagattaggaggtgaaatgtaatgtatatcaaagtangctcgcgactctggcgtgggacgcgcgnggtcacatgctctcggtatctattctaa

SEQ ID NO: 15166 - DNA, 579 bp, Glycine max
  misc_feature (47)..(47): n is a, c, g, or t
  misc_feature (133)..(133): n is a, c, g, or t
  misc_feature (151)..(151): n is a, c, g, or t
  misc_feature (161)..(161): n is a, c, g, or t
  misc_feature (293)..(293): n is a, c, g, or t
  Coding DNA Sequence Number=SeqID_5387
gaggaagtgacaacctccaaatattatgactattccttcgggatttnccaaaaattgcccagtgaaagactgataactcaagataggcccttctagaataaggccggcttattgaaagaaacccacttccagnactaaaggggaagggaanactcccttgnagaaaagtcttaaagagaagtttaaggctccaagccacttattgatagtttttaaagctgatcccttgagaaagaaagaaccttgtatgacccagtattggtgaaagatgcccctttaaagaagggatgggngggaaggaggcttcgtttcataatccattttgatatatttgaatcatttttttggaggagcaagctttggtggtggtgggtagttcccgaggtagaagacagaagcatggtgaagatgtggtgcattctttaaaggtttcccttgaagacgtttattatggcacaacaaagaaactatctctttctagaaacatattatgcccaaaatgtaaaggaaaaggttcaaaaagtggaactgctgtaaggttttttttgatgcaaaggcactgggtatgaaaattcaaga

SEQ ID NO: 15167 - DNA, 452 bp, Glycine max
  misc_feature (163)..(163): n is a, c, g, or t
  Coding DNA Sequence Number=SeqID_5388
gacatccaccttcctgtttagtgtttactgcctcacaaatctcaaaccctacctcgctagccatccctccagatccctccgcccctccccggccgccatgcggatccgcaggtccgcctcccgcctgctgggctctaccgccgcctcctcctgcccgaagccngagccgccccgattcgagctcccccgattggagccgcccccgcccccgcccccgccgccagccccagcccacgaatccggcgccgggttcgtggggcccaagacctcctccggcggggagccctgctgcgagctcagccggtcgccatgggacctcatggcgcagctcgacctctcggatccccaggtggagaagctcttcgtggagactagtttcatgagtgtttcctggcgaggttgctggcttttcccagcaggcatcaccatgcctgccggctccatcaaggagg

SEQ ID NO: 15168 - DNA, 392 bp, Glycine max
  Coding DNA Sequence Number=SeqID_5389
ggaaacatatcgaagtctctcaaagagctcaggatccttctctgtcaatcttccccggctagcgcttccgccaggtttctcctccacccttccctttcgctctcgtctccgatcgaatcaaactctgttaagatcggcggttcaatctccgttgtgcgtgactttgagctgtttggattcaggacgttcgtggagaagaattacagagatttgaagtctctaaaccctaagttccccttcatgatccgcgaatgcactgggatccagcctcagttgtgggcacgatatgatatgggagtggagaggtgtgtaaacttggatgggatgagcgactcacagattctcaagtctcttgaagaccttgtgaaagccggaggagctacgaaagccta

SEQ ID NO: 15169 - DNA, 390 bp, Glycine max
  misc_feature (337)..(337): n is a, c, g, or t
  Coding DNA Sequence Number=SeqID_5390
tgggcatcggtttcgttgatggcttgaaggtgcagggcctctaccagacgaaggacccgctgccattcattcccgggacggaattcgcaggcgaagtcgatggcgtggcagacggggtgagcgagtattccgcgggaatgcaggtgatgggaatggtccggtcgggcgcactcgcgtagtacgtcgtagttccgatggaagcgttgcgtatcctcccggacggcatttcgccggaggcaggcgcctcgtttcgggtcaattatctgacggctcattatgcgctgacggagcgtgccaagctgcaatcaggcgaacagatgctcgtcttgggcgcagncgaggagttgggacggccgctatacagctgggcaagatattcggcgcccgcgt

SEQ ID NO: 15170 - DNA, 550 bp, Glycine max
  misc_feature (132)..(132): n is a, c, g, or t
  misc_feature (219)..(219): n is a, c, g, or t
  misc_feature (300)..(300): n is a, c, g, or t
  misc_feature (305)..(305): n is a, c, g, or t
  misc_feature (308)..(308): n is a, c, g, or t
  misc_feature (333)..(333): n is a, c, g, or t
  misc_feature (337)..(337): n is a, c, g, or t
  misc_feature (365)..(365): n is a, c, g, or t
  misc_feature (415)..(415): n is a, c, g, or t
  misc_feature (442)..(442): n is a, c, g, or t
  misc_feature (453)..(453): n is a, c, g, or t
  misc_feature (509)..(509): n is a, c, g, or t
  Coding DNA Sequence Number=SeqID_5391
taacaatattctgcgctgtcgtgtgtataatcttatcgcgtcttcaatctgctgcgactctcatacacctctcatatgcagctcgtcggtgagaagaacatagctactaaggtgcatatagaggtggtgagngatagttaatgatgtgacacaccaacagccacgccaccgctgctctacatctactgtgggcgctgcacaatcacgacgtacacacancagcgactcatctcacgcaggatctgacgtactatagtgatgcatcatgatgagatacgtgtatatatatcgtctatcacncatantgntctgtgtccttattacagctaatgntgcntgtcatcatattatgtgactgtatagtnatacttctgcgcgtcgatacatacactgctacacagacacatacgatagnggagcgacacacataacacattcacanaccgtacgtgngtgcacacgaacacacatacactaatactgacgagacggtgtgccaaattatacgncacatcacactgtctggcgggcgcgaagcaaaccaactaat

SEQ ID NO: 15171 - DNA, 431 bp, Glycine max
  Coding DNA Sequence Number=SeqID_5392
tacttttctttcttacgactctcgccggcgccgtgccctccccccgctgtcgcctccgccgccgccgccagccatgcttctcctcaagaaacacgtcctcctcctctctctccgtccccgcgccacaagtgccatactcgcgttccgccaccgatgcctcttctccaacacccgattcgccgccaccgccgccgtggcagcgtcggctagccctgctccgttcgccatggaggactacctcgtcacgtcttgccacctcaccctggcgcaggccgtcaaggcctccaaggtcctctcccgcctcaagtccccctccaagcccgaggccgtcctcgccttcctctccgacctcggcctctccgacgccgacgtcgccgccgtcgtcgtgtacgaccctctcctcctctgctccgaggtcgacaagaccctgg

SEQ ID NO: 15172 - DNA, 337 bp, Glycine max
  misc_feature (288)..(288): n is a, c, g, or t
  misc_feature (311)..(311): n is a, c, g, or t
  Coding DNA Sequence Number=SeqID_5393
atcacggcgggcacactattggctcacccagacagtacacctttgcagcaatcatcttcagggctgcaactcatcaacttttccccatcatgtcacgagtgccgcgccgctgtggtggtggaggtgcaggtggaggagtgatatggtgagtacagtcgggaggcttgtgtgtggcgtctgttcgcgtcagcccggatggtcatatttaatactaatgtgatattggatgtatggtgagctatttatctaaatggatgggtcttctatagtggctatatgttagaatgnaaaagagtacgctataccacatnatatggtagagagactcctgggcgct

SEQ ID NO: 15173 - DNA, 383 bp, Glycine max
  Coding DNA Sequence Number=SeqID_5394
gatcatcgccgccaacatgagatcggtcctgatggtcttcgccgtgctggcggtggtcgcagcgcgcccccagcagcagcagcagctccagcagaggccatcgccatcctctcgcaggacgccgtggtcaactcggacggctcgttccactccaggttcgagacggaggacggcgtcaggcgccaggaggtcggccagctccgccagctcggcggaaaggacgtcgccgaggtggtccagggacaggtgcagtactcggaccgcgagggtaaccagtacgacctgaggttcaccgctgacgagaacggctaccaccccgagggcgcccacctcccccagccaccacccatccccgccgagattcagcgctccatcgagtacaa

SEQ ID NO: 15174 - DNA, 583 bp, Glycine max
  misc_feature (46)..(46): n is a, c, g, or t
  Coding DNA Sequence Number=SeqID_5395
gataacgcttcggttcacagatggggagcggaggacaaacgctganttgatggtgataccgcagcctgtatatgtgaaatgatagatagcaagaccggtcccctatacgtattagtcgcgtgtgtgcgggcagttcgcacagttaactaattcccacttattatcgcgatagttctcctaagccagggtcacgttacggtcgggtggtgttgtgggcaggaacatcatcttctatcttgcgcggcgatttatgcatatatggacggaacgagagagcagacgcacactaatcacgagatggtttcgcgtcccactactttggtctggtgatcgatgatgagttgtggggcgctgagattcacgtcggtaacgctgcatacacaacaatgttaacggcgggtatcgcgtggatcgcggagcagcatgagatatatccatctattcgtgcgccatccgcgcgcagcctaaatgtttcagcaataacgttacacatacgggaaaataaggaattataggggtaaggatcgacacccgccgcgcggcgtggttatgggagcggcgagggccgaaatctctgttttat

SEQ ID NO: 15175 - DNA, 254 bp, Glycine max
  Coding DNA Sequence Number=SeqID_5396
gcggaggttttcaatacagaactcataaagttccacaacatcgaagaggagatagttcaactgttgcaaatcacaataacttatatttcccttatacctaatcagagacccaacatacgaaacataatacatataattaaaaacattaaccaggactataccaataataacttcatacaatcctccgatgacccttccaaaagatcctgaaatcatacaccacccccagagtcaaatactccacctatctctct

SEQ ID NO: 15176 - DNA, 394 bp, Glycine max
  Coding DNA Sequence Number=SeqID_5397
gcatcaggactacaaccaacttttttagagtcttggacaaaggattggaaatgtaatcccaatatgatcagtttagagtttgaaatatacaaacacaagttcttatcaaacgatttattgggtagagcagtattagacttacaaaattacacattcgtgacaaaaaaaccaaaaatcatcatacttccagttcaattagtcaaacaaaaggtaaaatcaactctcacagatcaaccatctatcgtcattcaaatcacaccagaagattttggttaccatccatcaccatacgtatggacatggtcatatgaacaacaagaacccactttgattatggatcttgccgatgtagtacaagtttcttgctctgaaactgcaacctattttgtaacag

SEQ ID NO: 15177 - DNA, 320 bp, Glycine max
  Coding DNA Sequence Number=SeqID_5398
ttttccttttgtaataatgcttctctctctctctctctagtttcttctaaatttaatggtgtcatgatgatggtaatatttactatatttttgctttgatgggttgcttgcagataacgtttgagttgacagtgaagcagctgatgagctttgatccaggtgaatggactgagacactaaggaaagagtacgtgcttgtgattgaaggatttttctcagttcccttgcctctcttctcaagtacctaccgtagagccatcaaggtgtgcatgctctttaattaatttctcttttatttgacttattgttatattcgtctg

SEQ ID NO: 15178 - DNA, 476 bp, Glycine max
  misc_feature (35)..(35): n is a, c, g, or t
  misc_feature (98)..(98): n is a, c, g, or t
  misc_feature (174)..(174): n is a, c, g, or t
  misc_feature (260)..(260): n is a, c, g, or t
  misc_feature (262)..(262): n is a, c, g, or t
  misc_feature (265)..(265): n is a, c, g, or t
  misc_feature (358)..(358): n is a, c, g, or t
  misc_feature (361)..(361): n is a, c, g, or t
  misc_feature (396)..(396): n is a, c, g, or t
  misc_feature (400)..(400): n is a, c, g, or t
  misc_feature (402)..(402): n is a, c, g, or t
  misc_feature (450)..(451): n is a, c, g, or t
  Coding DNA Sequence Number=SeqID_5399
aatagtatatcactgcttacccctcacactatccntattgtgaaggtacgagataaaataggtgtgatgtgtttgtgttgatctacaccctaacatgntggtaggatggtcgaagagtattatagaatacaatattaaatcgggtgctgtcggcgggcgtgggtgagagaacantagagaggataggagagctagcagacaaaaaataatgagagtctgatgcgaataacatataacattattatactagtcgtgtgtgngngantcgaacaacatactcaacaccccggtggcaatcagagtaacatacctaggtggcggttgtgattatacataggatgtagtctaatacaacgancangacacaataaacaaacacaacacgacaatagaggntgtnanttcgactactgcgcgtcgtctcgaggagcgaactgactcacatagccnnctgcgtgatcgctcgcgtttgtgtg

SEQ ID NO: 15179 - DNA, 587 bp, Glycine max
  misc_feature (111)..(111): n is a, c, g, or t
  misc_feature (133)..(133): n is a, c, g, or t
  misc_feature (300)..(300): n is a, c, g, or t
  misc_feature (321)..(321): n is a, c, g, or t
  misc_feature (352)..(352): n is a, c, g, or t
  misc_feature (354)..(354): n is a, c, g, or t
  misc_feature (362)..(362): n is a, c, g, or t
  misc_feature (434)..(434): n is a, c, g, or t
  misc_feature (438)..(438): n is a, c, g, or t
  misc_feature (471)..(471): n is a, c, g, or t
  misc_feature (497)..(497): n is a, c, g, or t
  misc_feature (508)..(508): n is a, c, g, or t
  Coding DNA Sequence Number=SeqID_5400
actatgttcgtattacctcgctactctgctgacgacagtatatgagtatcactctcactagttgagctgttatatatacatacgcgaacactaatcgtagggtctggtctntttcttgcttagtagactatgngacatatgagctgacgtctttactcgtcgcactctcgcgtatagctagtgatggcgagcactctctcacacgaccacagactgtgcgattaataatagatctactacacatgtatcgaagctatgatatatactcactactatgatgatgcttctctctatagaggntgcaccgcgactaaagtagangtcgatgaagtacgcttatgatcttgaggcncngatagagnatgctatgctattatgagagagccgctacggattctctacttatacacatgtcattgcatgtatagatgcgncgcncaactgtacgaatcgtctgatgtgacgactatnacagtatctactgtgagtgaatgagnatgatctctcngtctgatcgcatgcgtagatgactgacctagttgcatctgacatagatatcagagtgggatatactgcctacatgcgcg

SEQ ID NO: 15180 - DNA, 498 bp, Glycine max
  Coding DNA Sequence Number=SeqID_5401
gtgaaaatcgaactcaagtcaagattcaaagttgcggacaagtcctgctaaactccctcatcatatggaggggggtttgccgagtttgctggggctagggaaaatttaacagcgcccaaaccttttggaggctccagccgttgaaatttgaaatattggcaatcgccgggtaaaaacggctcgggggcccccccccaaattgcggagaaaaaagtttgtggggccgtgccccccccaaaaatttttaaaaccttgttttttcgggggggagaaaactttatttttgttcaaaaaaaaaaaaaaagaaacccccgttgccccccccttgtggggcgcccaaaaaaaattttttttataatggtgttagggcccagaatgtttttttaaaaaacaacaccagggggggtgtcgaaaaaaaacccctctttagagaaaaaaacggggggaaaatattaacaggcagaaacccccggctctttctccccaacattagtggga

SEQ ID NO: 15181 - DNA, 488 bp, Glycine max
  Coding DNA Sequence Number=SeqID_5402
gtgccgtgcgatgtatcatgcacttcgattttctcctcctatagagaatttaggaaagaggttggtggatcggctgacatcacacggaggaacatatattgctctgcatctgacatatgagaaagatctgctttctttgactgggtgtgcatattgactgactgatgcgaaatctgtctagcttacagttatgatggagattgcatcttcttggatgatcccactcatctattcgccagcactggtatgtggcagatcaagcccatcttctttggaacctgggatccttacactgccttgagcaggctatctcgtgcttgcaacacacagaagtgcattcgagctggcgtgtgacacaatgatcttgatgatgtagggaacgatactgtccatcacacccttcttgagatgttgggcaattgctccttttgggattactgttaagtacaacccatcttactgacgtgggagctcgtatgataagtcat

SEQ ID NO: 15182 - DNA, 553 bp, Glycine max
  misc_feature (234)..(234): n is a, c, g, or t
  misc_feature (237)..(237): n is a, c, g, or t
  misc_feature (240)..(240): n is a, c, g, or t
  misc_feature (341)..(341): n is a, c, g, or t
  misc_feature (440)..(440): n is a, c, g, or t
  misc_feature (528)..(528): n is a, c, g, or t
  Coding DNA Sequence Number=SeqID_5403
tctcgaggcgagtccatactatcagacaagattggcgcccacgtgtgcactattgatctgtatagagactcatcaacccacaactccattgaacattgttggctatacgggagaacttactacggtatctgctcccacacgtattgagtggtggagagagtagtggtgtgcgtgggaagatggaagtcgcgccccagactcagcctgaactcgcaccgtataatccaaagaaanganganaccacacacgccagcttcactagtacctgtgtattgctaataagatgagattgtttattgcgctcatcttgaaacatctattcatccgaagtggacgtacntatctctccgcgcgatctctgtcccaccctcacactcgcgccgccggcggggtgacgcgatgagaggacaatacgccacgctaaatcgaacacgtatantgcattgtggtgtgggtgtgtagtacccacagtggtgtggtatgtcgtaggaagtatgtcctctggcgtgtggctaagttataaaacnataggatacgtcctcactccgcata

SEQ ID NO: 15183 - DNA, 326 bp, Glycine max
  misc_feature (36)..(39): n is a, c, g, or t
  misc_feature (41)..(41): n is a, c, g, or t
  misc_feature (45)..(45): n is a, c, g, or t
  misc_feature (47)..(47): n is a, c, g, or t
  misc_feature (49)..(50): n is a, c, g, or t
  misc_feature (52)..(54): n is a, c, g, or t
  misc_feature (84)..(84): n is a, c, g, or t
  misc_feature (87)..(88): n is a, c, g, or t
  misc_feature (105)..(105): n is a, c, g, or t
  misc_feature (107)..(107): n is a, c, g, or t
  misc_feature (109)..(109): n is a, c, g, or t
  misc_feature (111)..(111): n is a, c, g, or t
  misc_feature (117)..(117): n is a, c, g, or t
  misc_feature (122)..(122): n is a, c, g, or t
  misc_feature (151)..(152): n is a, c, g, or t
  misc_feature (182)..(182): n is a, c, g, or t
  misc_feature (195)..(195): n is a, c, g, or t
  misc_feature (198)..(198): n is a, c, g, or t
  misc_feature (202)..(202): n is a, c, g, or t
  misc_feature (235)..(237): n is a, c, g, or t
  misc_feature (239)..(239): n is a, c, g, or t
  misc_feature (278)..(278): n is a, c, g, or t
  misc_feature (291)..(291): n is a, c, g, or t
  misc_feature (295)..(295): n is a, c, g, or t
  Coding DNA Sequence Number=SeqID_5404
ggtgctcactatacactaactctacttctaaatgannnnantccnananngnnnggttgatgacttaaggcgcctagcatgtgncgnnagcacatacttccattntntntngagganatatnagaagtagatagtgaacatacgatcaagnncaccgacgttgttggcatatatacgatctntacgacacagacnacngagnaccaacgagccacacggcgccacacatcgtggnnntntgatagagagacacatgacctagtagcaatctacgcatntagtacagagcgnaggngagtgaaagaggaagcgtaggaagagtgtct

SEQ ID NO: 15184 - DNA, 551 bp, Glycine max
  Coding DNA Sequence Number=SeqID_5405
tatgcagtttgtccatatcaaaactggattcactatttattatttcttcagccaacctgcctacggagatgtgtaatcttgagctccctccacaagcaagcaagaaagaacgaactacttgtgactcttgaaggcttttacgctcagtgagttcatacgcgcaatccaaataaagcctgagatttgccatgttgtaaatagtttcatccttttgtagggtgttgggacaatccacttcaagattgaagagcttctttgcatgtccaatgaatgatggacaggttaaaagaaaatgtttcagctcagtcccctctttatcagcattattgctataaggtttttccactacgatgccataaccactgtctctccgccaattcctgactcgccctcttctcccgctactcctacaccgctcgatccacctgagtccaaaccatcaatcctcctcccactgcgtgacccaacaccccacaaccaccccatccactcccctcactcacccccgttcctcacacctcttcgcgcctaacccgcgcatatctgctgta

SEQ ID NO: 15185 - DNA, 558 bp, Glycine max
  misc_feature (96)..(96): n is a, c, g, or t
  Coding DNA Sequence Number=SeqID_5406
gtatgctcttctggtaatctctatgcttatagtaaatatattctgcgagtaattatgctccatgacgcagaaccgcacaccgcgcacacacatccnaatcgacagcgggaagtcgagacagcatgcagggagtcagttcgtccgcgtatcgtgcatttatataatcacctatctatccctcttgctccatatcgtcactatcattactattctcggcgtgcggagtgcgtcgggatggttgtactcgttccgtccgcaaacgcatgtataacccagacgtacacaatgaatcaatgcccgctcacagtatagacggggctccgcgaacacacctaaactctgtcctctgggcgtttgttgcttactatcctccgcttgccttggttcgtgcaaactacgtattctcgtcagatatagagaaaagtttgtctcctgtgcgccatccgtggatgtgccgtgatggcagaaacattcgtcctcccttcttgtgggcatcgcttaaagcatcgcagcgcacgaaagatgaataaactagaagacctgttgcgcttagcgaag

SEQ ID NO: 15186 - DNA, 412 bp, Glycine max
  Coding DNA Sequence Number=SeqID_5407
gtaatgcccggaagtatgacccactgcacccaatcgagtgctttcagctgcatctaaagaaagtggtgttgaagaattatgacggcgaaaatagtgcatttatcaactttgccaagttctttcttctgaatgcgaaagcgctaaaggaaatgaaaatcacatcgccttaccaccgccagcacaatttctttgctaatatacagagcaagctacgagatcaacttagagcttctccggatgctcaaattgaactgagatgtggcactagggattatttcacacgcaacaagcatacccatgatttgtcgatgaacgatccctttgacatgccgtccatcggatgctggaggtgtaaagagttgggtctaggagatactacataccaggtttaattagaactcgggctgcctgt

SEQ ID NO: 15187 - DNA, 527 bp, Glycine max
  misc_feature (60)..(60): n is a, c, g, or t
  misc_feature (75)..(75): n is a, c, g, or t
  misc_feature (89)..(89): n is a, c, g, or t
  misc_feature (98)..(98): n is a, c, g, or t
  misc_feature (133)..(133): n is a, c, g, or t
  misc_feature (138)..(138): n is a, c, g, or t
  misc_feature (165)..(165): n is a, c, g, or t
  misc_feature (168)..(168): n is a, c, g, or t
  misc_feature (251)..(251): n is a, c, g, or t
  misc_feature (303)..(303): n is a, c, g, or t
  misc_feature (307)..(307): n is a, c, g, or t
  misc_feature (329)..(329): n is a, c, g, or t
  misc_feature (362)..(362): n is a, c, g, or t
  misc_feature (368)..(368): n is a, c, g, or t
  misc_feature (382)..(382): n is a, c, g, or t
  misc_feature (394)..(394): n is a, c, g, or t
  misc_feature (400)..(400): n is a, c, g, or t
  misc_feature (447)..(447): n is a, c, g, or t
  misc_feature (453)..(453): n is a, c, g, or t
  misc_feature (458)..(458): n is a, c, g, or t
  misc_feature (460)..(460): n is a, c, g, or t
  misc_feature (488)..(488): n is a, c, g, or t
  Coding DNA Sequence Number=SeqID_5408
gtagcgatgaagcatgcaccacgatatgacgaacacgtcgtactcacgcgttgctctcanactgactgaatccantgtgacagactagncacccacgntctctacgccacgtaccatcggacgtactgccctncatcncacagatggtgtcgtagatctacgtancgngcgcacatgacctgacgcgcgcgcggcacaactattagtgtctcgcatatcctgtaacctccgtcgcacactagatgtgatcntgacgcagcgcacgatgggcagcggctgcaatcatacagctagatgatagantacnaagtcgaatacgacacgcacangtcgagcggcacgcgcacgagcacgatgcatgngacacncatcatgctgcatncatcgacgatgntgcgcnaggctgctgaacagtgatacgttaatctgagaagtgaactgagaagngtcagnagtgngncgtcgggagtatacactgcgtcacggcnacgtgcgagaagatgtaagatgcgaagtgatcggacgta

SEQ ID NO: 15188 - DNA, 534 bp, Glycine max
  misc_feature (127)..(127): n is a, c, g, or t
  misc_feature (193)..(193): n is a, c, g, or t
  misc_feature (278)..(278): n is a, c, g, or t
  misc_feature (413)..(413): n is a, c, g, or t
  misc_feature (438)..(438): n is a, c, g, or t
  Coding DNA Sequence Number=SeqID_5409
caaggcgcattgaccgatgatgagtgatgtggagtagggcgagagaagatataaattaatgagcaccgcgacgcgagacgacgcacagacacgacgtgagtgtgtgtatgtggtgtcatactgaaangtgtagcgacgtcgtccgccgatcacacgagccactggacgagcgcactgcgcgggtgagagtggnagtagagaaagacacacgaaagccaaccaagacagcgcgactcgagccgacgcgctcgacgtcatgacgatagtacccgagaggnagatgtatgacatagatcagaatagacagcacgcagcggaaggagacatataatctacacaccccgcacagaagcgagccgcagtgtcaacatgcgccgtgcgcactacacagtgatcgcaacatatatgcagantgaatagatgtgcgtgcgctagaancgagcgtcgcgtacgctatgttgacgcgcgcgatcatcttccatctctcacggcacacggtgcgtcgtggcgatgacactatgacgcgatctccgc

SEQ ID NO: 15189 - DNA, 343 bp, Glycine max
  Coding DNA Sequence Number=SeqID_5410
ttaatgagattgattggagcccatcaaggtgatttccttcgcttaataaataaccctccaaaaggtgttgaagggaacatattggggcaaatggtttttgggatgccccaaccagtaacggtccctcttaaggaccggcaggcaattgaacgttttgaaccaatgggttttgatcgcgcaatcgtattggaggtgtatttcgcttgtaacaaaaatgagaaattggttgccccctcccttttggatcacaggcatgattttaaggaccaatagatctcctttggaatccccccaattataaggggtcattttttttctcgaggggtttttgttacatcctatg

SEQ ID NO: 15190 - DNA, 364 bp, Glycine max
  misc_feature (140)..(140): n is a, c, g, or t
  Coding DNA Sequence Number=SeqID_5411
aaatttttggccactaattattcagaatatcgggaacccccggctgaaactttcttaaaagaaaacccaagttggcttggatggaaacccgggaacccgggatccattggccctgggagccataacaaaacccccaaccngaattcttatagccgggccggggaaacaaccgttcccccccctttaattggccgggaaaaaaagcccttaacccccggggggatggaaaccttccccccccccggtgggaccaaagcgccaaaaactttgacaaaaaaccaaaaattttttaaggggcgcgcccctcccgttgggggaaaaagcccaaaacctgggattcacctccccaaaaagtgggactcat

SEQ ID NO: 15191 - DNA, 550 bp, Glycine max
  misc_feature (114)..(114): n is a, c, g, or t
  misc_feature (182)..(182): n is a, c, g, or t
  misc_feature (449)..(449): n is a, c, g, or t
  Coding DNA Sequence Number=SeqID_5412
caatgcgaggatattgccgcgccaacagtgcggcggtttctgcactactaccagctctacactattcgtgtgatgccgcgtggtggtcgcaagataacagacagtgcagcggangcgctctgtgggagactgtgcgagcacccaaaggtgcgttgcataccgtcgttaggtctctaaccacncacgcgggggctcatgcacggcgagttctctcctctcgtccacatgtcgttactcgctgctcacgtctacgtctgaggcgtgtgattgagggcgtcagatagaccacacacggtcccaagcggcggagggactagagtgcatactggcacaggccgagtacgcgtagaaagcaagtctagtacgacagatgagcgaagtgatgacgtgatagaataaattagagatgggacacgacgaacgcgagcgaaacaggatcgcagtgagtnacatatagacacgtgctgtcgcgcgtggggcgtggatgctgagatcagtagtagttctgcgtcacccacttaagcgtgagcatcagccagtagtacaacgt

SEQ ID NO: 15192 - DNA, 537 bp, Glycine max
  misc_feature (73)..(73): n is a, c, g, or t
  misc_feature (82)..(82): n is a, c, g, or t
  misc_feature (157)..(157): n is a, c, g, or t
  misc_feature (159)..(159): n is a, c, g, or t
  misc_feature (170)..(170): n is a, c, g, or t
  misc_feature (185)..(185): n is a, c, g, or t
  misc_feature (189)..(189): n is a, c, g, or t
  misc_feature (260)..(260): n is a, c, g, or t
  misc_feature (307)..(307): n is a, c, g, or t
  misc_feature (310)..(310): n is a, c, g, or t
  misc_feature (341)..(341): n is a, c, g, or t
  misc_feature (366)..(366): n is a, c, g, or t
  misc_feature (368)..(368): n is a, c, g, or t
  misc_feature (373)..(373): n is a, c, g, or t
  misc_feature (465)..(465): n is a, c, g, or t
  misc_feature (490)..(490): n is a, c, g, or t
  misc_feature (494)..(494): n is a, c, g, or t
  Coding DNA Sequence Number=SeqID_5413
attccatgcgcagtagatattctagcaagcgctactagctagtttcggatgcacgcacgtgtcaatgctacanctgcgtccncacgtcgtagctctcgcgacagtttatgacgcatatgcacgcgtactcacactcctcgatactgagacgatgtancncacacacacgncattcagacacgacncgcncgccactacgaacgatgtgagtagttactctgatgtgtcactcggtcgcacgtatgtgagagatgaatcancaatcactaagtcactatctctgcttagtaacagtgcttatgctgcncanccgtctctcatagcactcagtagttgtgctngtatatgcattctgagactcgacancnatagnatcacatgcacacgcactgtatagctgtactgtctcgactgggtagactgtctgacgcacagcaggacacgagagcgcgacgtcacacgttnttgcgtcttcgcttgcaccagctcncacnctgacactgctatatactatgtcagtgctgatgcgagcgattg

SEQ ID NO: 15193 - DNA, 550 bp, Glycine max
  misc_feature (51)..(51): n is a, c, g, or t
  misc_feature (53)..(53): n is a, c, g, or t
  misc_feature (99)..(99): n is a, c, g, or t
  misc_feature (214)..(214): n is a, c, g, or t
  misc_feature (217)..(217): n is a, c, g, or t
  misc_feature (219)..(219): n is a, c, g, or t
  misc_feature (224)..(224): n is a, c, g, or t
  misc_feature (242)..(245): n is a, c, g, or t
  misc_feature (247)..(252): n is a, c, g, or t
  misc_feature (285)..(285): n is a, c, g, or t
  misc_feature (301)..(301): n is a, c, g, or t
  misc_feature (319)..(320): n is a, c, g, or t
  misc_feature (327)..(327): n is a, c, g, or t
  misc_feature (383)..(383): n is a, c, g, or t
  misc_feature (417)..(417): n is a, c, g, or t
  misc_feature (421)..(421): n is a, c, g, or t
  misc_feature (431)..(431): n is a, c, g, or t
  misc_feature (462)..(462): n is a, c, g, or t
  misc_feature (470)..(471): n is a, c, g, or t
  misc_feature (488)..(488): n is a, c, g, or t
  misc_feature (497)..(497): n is a, c, g, or t
  misc_feature (508)..(508): n is a, c, g, or t
  misc_feature (511)..(511): n is a, c, g, or t
  Coding DNA Sequence Number=SeqID_5414
catgtcattaggtacgtagctgcgcagagcgatagacacaatcacacagtntnttagtgcatggtgatgcatgcgtggtatacgatgacgcggcctctncatcatcgattaagacgagagactatacgctcgtaaagtagtgtagtatggcacgtatgtcctttacactcctgccataggcgcgtgacaatccgtactacgtgtacactcggcnatnantacgntactctacagttctctcnnnncnnnnnnctgcgatggatgacggactgaaatcacaccagnacgacgacacacgtcntcgcttctcttagtacgnntctcgtngttgacacgcagcatggagtcgatgatcagactgcgctatgaatgtgctgccagcnctaggatcagatgcgtgctcacatggcacacacncgtnattcattgtngtacatatagcgtgatgctcgtggactactncgtacganntcagatcaatgcagcancgcgaccancaatacgcgtntanatgttgagcgtagtcagaggacgcagtgatgagagctat

SEQ ID NO: 15194 - DNA, 336 bp, Glycine max
  Coding DNA Sequence Number=SeqID_5415
tcagctccgcacacaaagctctgaagaggacgagaagaagtccgatcgatcttgccatggactccagggtgtccaagagcccaccttcgtctccgcccccggcggcggcgcaagaagacgagggggacgcggcggcggcggtgcgggtgacgagccggctgtacctgcacaggcccgggcccggcgcggggccgctggagaaggacgccgtgctccgccgcatccgccaccggaggcgcgccaaccgcctccgggacacgctgcgctccctcctcgtcctgcagcaacagcagcccaccgcgccggagccggaggacgcgttcacgtctccgtagc

SEQ ID NO: 15195 - DNA, 343 bp, Glycine max
  Coding DNA Sequence Number=SeqID_5416
gcttgaagccgtcgcccgagctctgtcatcaccgtctccgtgtcgatcccgcggccaccggccatccctcgtcgccgcaccatgtcgaggagcaccgacgtcctcttcttcatcgactgcaagcgccgattccagctggagcccctctgagccgtcgcaatcgtcgtctccgtcgactacatccaccactgtcgtcgctcgatctaccgccgtcgacgcctccccgaccctctccggcctctccctggctcggtgatgctggagcccaggagccagacgccaccgtcgacgacgactcttactacactggaggtgcctactactacgagcaggccgctgacga

SEQ ID NO: 15196 - DNA, 240 bp, Glycine max
  Coding DNA Sequence Number=SeqID_5417
agcctcagagaactgaccatgaatctccctaattatattacagccacaatgtgtatatttacattttcgtccatcttttccttgtgggtagtatggtactgattcacttatgcttcaatatcttaataatgatatcatgtaggcctagatgacaaagagtcgcatcttgtatgtctaaagtcaagaatgcatatgcttgttttaatagatgcttcgtgatgatattctatcctcatagat

SEQ ID NO: 15197 - DNA, 504 bp, Glycine max
  misc_feature (364)..(364): n is a, c, g, or t
  Coding DNA Sequence Number=SeqID_5418
ttctcaactctctatcttgctacattactcgtgttcgtctcccaagttctcttttctttcctacgtctctagtctatattttttctgtggtgtgttgtagatgtctagtagagaggatgagggggcacgtagcaagacgccgcaaaacatcatttttatgacatttcttttttttttctatcatcttctatactacaccctcttacctttcttttcaataacttctacctccctcttctttatttctctcatccacccctctcccctctctaccaacctaccctccccgctccctccacaccatttacatctcgtattcaatatatttctatttttttgggtggtaataaacatattttttttncatactcctccttctcttgcgtcgtcctgccttccctcctcctgctgccccttctcggcaaagaaatcacgccagtcctgcctctttcttcgtctgtgaaacaaccactctcccttctcttcggtcgctccggttgtttt

SEQ ID NO: 15198 - DNA, 414 bp, Glycine max
  Coding DNA Sequence Number=SeqID_5419
gggtgtcacacacaatgactctcggcaacggatatctcggctcttgcatcgatgaagaacgtagcgaaatgcgatacttggtgtgaattgcagaatcccgtgaaccatcgagtctttgaacgcaagttgcgcccgaagccattaggccgagggcacgcctgcctgggtgtcacacagaggcagaggttttcgtcttccgaggaacactgcgtggccacaccgacactgtcaccgcaatagccaccccagagaacaacaacaacaactccgacaaaatcatcgtcagttcctcccgtgacaattccttaatcgtgtggcgcctcactaaggaatactcaaactcttacggtgttctccaccgcaggctaaccggtcactctcactttgtcagcgatgtcgctttatcctccgacg

SEQ ID NO: 15199 - DNA, 472 bp, Glycine max
  Coding DNA Sequence Number=SeqID_5420
atcaaggttccgtatgccagagcttcggaaatcgatatttacattgaaggcgacgacttcaaattctacgccaagccgtacttcctgaggctggcactgccaggaaggatcgtagaagatggaagacaaaaggcaacttacaatgctgatgacggtatcataacagtttgtgtacctaaagagacgcctggacagcattttgagggactggaattgttgacttctcttttggcgcctcgaggatccaagtcggctaaacccctgatagaagagattgggtcttcacaggatgttcttgaggaggaagatgaatttgattggcagatagagcagactcctttcgtggaacctacagaagaggctctccagtcacagtgcacttacggctttgggaatttacggtcaggcgtcttcgggcgactgcaggaggaattgaatgatgttattgacttaagggatccagacgtcactc

SEQ ID NO: 15200 - DNA, 561 bp, Glycine max
  Coding DNA Sequence Number=SeqID_5421
gtccatggtaagttcgcattctgcaagatcaaccatcaattcgatgtttttctctttttcttcaattttttgcgttaaaagttgacgagggtctcgctcggaaaaatacacgacgcccagcgttgttggcccgctttggttcgctgatcgacaagcctcgacgatgtgcatgataaatcacccaccgtcacgatattgccgcttcactcatgacgcttccattcgctgcacacggtccacacgcaaaatgacaacactgcgtagaaagtgaccacggatgcgttattattcagtcaaaatcgattttagtaccccctccccgtccgtctgcggatgccggtggtgtccccagtcaaggtccggttaagtacccgaaattggcccgggccccggatcgcgacctttcacgctccatattgcacttgggtggattttgctacattccgacccccccccctgccccgggcccccctcttaaaattatcgggttccgatgcgtatcgcagtttctcttccgagccctctcgctgcgggaggatgtattccgaaaacctcttctgc

SEQ ID NO: 15201 - DNA, 461 bp, Glycine max
  Coding DNA Sequence Number=SeqID_5422
ggctcttgcggcacaagaagccacacaaagatgcagatcttcgtgaaaaccctgaccgggaagaccatcaccctcgaggtcgagtcctccgacaccatcgacaatgtcaaggccaagatccaagacaaagaaggtatccctccggatcagcagcgattgatcttcgctggaaaacagctcgaagatggccgtactctggctgactacaacatccagaaagaatccacccttcatcttgtgttgaggcttaggggaggaatcatcgagccttctttgatggcgttggctcgcaagtacaaccaagacaagatgatctgccgcaagtgctatgcacgtcttcacccgagggctgtgaactgcaggaagaagaagtgtggccatagcaaccagttgaggcccaagaagaagatcaagtagactctgttcaaggaactatctgctggcttgcttgactctttttt

SEQ ID NO: 15202 - DNA, 236 bp, Glycine max
  misc_feature (26)..(26): n is a, c, g, or t
  Coding DNA Sequence Number=SeqID_5423
aatacaatagtgctctcacccactcnccttgctttggctctcacaagatcgagtctttgaaggttggagagagaggttgctttgaaagtgtgtgaggaggagaaatggctttagagtacgatcttctgaatgaaaacgtgaagaagtgtcagtatgctgtaagaggtgagctctatctccgtgcttctgagcttcagaaggaaggcaaaaagatcattttcacaaacgttgggaac

SEQ ID NO: 15203 - DNA, 487 bp, Glycine max
  misc_feature (87)..(87): n is a, c, g, or t
  misc_feature (104)..(104): n is a, c, g, or t
  misc_feature (107)..(107): n is a, c, g, or t
  misc_feature (142)..(142): n is a, c, g, or t
  misc_feature (145)..(145): n is a, c, g, or t
  misc_feature (147)..(149): n is a, c, g, or t
  misc_feature (157)..(157): n is a, c, g, or t
  Coding DNA Sequence Number=SeqID_5424
tatgtgatgctcttgtgctgtcggcgcttgtatatcagggaagagtgtaaacgatttatcttatagcccctttcttctgtaccgccnccacaacccccaccggnggnggcgaccgccgcccgtgtggtatgaaatgagacancgnannnttccctancctattgagtggcttgcggtctcgcacaaacacaatacgaaggaggtaggcggcggcagggttattatttagttggattgtggtcgccgatctctccactacggacgggatatatgccgctcctctggctgttctgtcgtccctctcattgtctttttcatcttagcttattggattgtatcgtgatcgcgcgtccgccccactcatccgctcttcctcttcccaactctcctcttaacggtctccgcacaaatcttcgcttcgagccgaatatcgctcggcacactataagctcgcgacaatcgtctgccgtctgtgtgggatttggtc

SEQ ID NO: 15204 - DNA, 403 bp, Glycine max
  Coding DNA Sequence Number=SeqID_5425
agcctacgtgacattgatcttcttgtattcgcctgccaaaaggctgtatcaggagatacttacacgacgctatcactcgacgatgaccgctcctcctattccctcttagccaccgactgggactcccggtccgcctccgtgaccgcccctatatccaagaagtccaacgctttcgacgaggagtctgagacagacagagaggagtctgatgttagcggctccgacagagatgacacatactggatcttgtgattctgcaatttgagaggaaatgagttcttgtgcgaggatgatgacgattacatccaggacgacttcaagctgtgtggattgagcagtctggtgccttactatgatcatgctctggatttgattttggatgttgaatcgtaccatggagaca

SEQ ID NO: 15205 - DNA, 537 bp, Glycine max
  misc_feature (97)..(97): n is a, c, g, or t
  misc_feature (103)..(103): n is a, c, g, or t
  misc_feature (127)..(127): n is a, c, g, or t
  misc_feature (145)..(145): n is a, c, g, or t
  misc_feature (262)..(262): n is a, c, g, or t
  misc_feature (288)..(288): n is a, c, g, or t
  misc_feature (299)..(299): n is a, c, g, or t
  misc_feature (301)..(301): n is a, c, g, or t
  misc_feature (313)..(315): n is a, c, g, or t
  misc_feature (326)..(327): n is a, c, g, or t
  misc_feature (332)..(332): n is a, c, g, or t
  misc_feature (334)..(334): n is a, c, g, or t
  misc_feature (393)..(393): n is a, c, g, or t
  misc_feature (395)..(395): n is a, c, g, or t
  misc_feature (440)..(440): n is a, c, g, or t
  misc_feature (495)..(495): n is a, c, g, or t
  misc_feature (501)..(501): n is a, c, g, or t
  misc_feature (503)..(504): n is a, c, g, or t
  Coding DNA Sequence Number=SeqID_5426
tacatgatatagactgcagaggccagttctttctctcctttcttctgttcgcattcatagttcaagcatcgcgcacgcaggcgggtaacgcacacanctcatntgatgagtaagacacacaccgcancgcaagacagtcgttcgnggccacgttcgagcgcgcatactcgtgtcagttagctctcatgtggtgtctgattcgtcttccttctctatcatgttgtgctaatagttgtgtgactacatatatttctatcatttnggtgtagtgttatcgtcgctataacncaagcgccagncnatcacgacacannnccactcccgcnnggtantncagcctcactttcctacaccacacatacacatatttcttgtttagatcgtcttatatcntngtttctacttctctcttcctgtaggcaactacagaagtggaacanaatataaaaaatagaacctctatcatatatcagaacgttgcaaggcgatcagagnggtggncnnggcgcccctttacttattctcatctcctgctct

SEQ ID NO: 15206 - DNA, 568 bp, Glycine max
  misc_feature (65)..(65): n is a, c, g, or t
  misc_feature (392)..(392): n is a, c, g, or t
  misc_feature (502)..(502): n is a, c, g, or t
  misc_feature (526)..(526): n is a, c, g, or t
  Coding DNA Sequence Number=SeqID_5427
aggtatatgtaccactccatgcacctgtctcacaatatgtgagtgtgccatcccgcgcgccgtcncgtgcggcctcactctctatacacgccaccgcgcgcctcgttacacatagcttaagagccctcgctctcctcatcgactctctccatcttctcatgctcctctctatcattctctatgtctgtatattgcttccacttctgacgcgcctatctcgtgtgtcgtcgtctcctatactgattctcgccgtatacagtgatcggctgaggatagcgtacgacatgaaccgacatgacacataagacacaatccatctactctgcattacactcgtacacaatacacacacctatctcttatatgtatatatctacgcacacacctgactncgctacaaggctcgagtgtgattgctgtcggatcgttgcgcgtgctactgcatctctgcatagcagtgtagcgtgtaatactggcgatcatgcacgccctgcgccagtcnaccacttcatgcgctgctactacntcctagctgacatcgtcacacatccatcttatacaggtcaga

SEQ ID NO: 15207 - DNA, 464 bp, Glycine max
  Coding DNA Sequence Number=SeqID_5428
gtctggctgctcgtattatccggatccggggccccccagccactgctctcgttttcgcatctcgcaacatggtcggctccggggcctggcgtgtgccccagtcggctggggcggcttgcatgttcccttggtgctttctcaagcttggttccccagctgtttccagggcttttctgccgcaggacgctgccggctcttgtgttgcctagttccccctccggcttgagggtcctgcctggtcccatggtgcgtgctcaggctttcaccccctgcggtttcctggaccccgcgctcgctgggtgcagcccaagccagccttgcttgtatttctcgctggagcaggtgctctggctgggcccaggggttcgggggactcttactctgctgtcgagggcttttatccagtgcgttctgagttcaggacagcccttcgtggtgcccctcggccttgtgtgctggagctg

SEQ ID NO: 15208 - DNA, 564 bp, Glycine max
  misc_feature (78)..(78): n is a, c, g, or t
  misc_feature (82)..(82): n is a, c, g, or t
  misc_feature (108)..(108): n is a, c, g, or t
  misc_feature (110)..(111): n is a, c, g, or t
  misc_feature (135)..(136): n is a, c, g, or t
  misc_feature (157)..(157): n is a, c, g, or t
  misc_feature (175)..(175): n is a, c, g, or t
  misc_feature (204)..(204): n is a, c, g, or t
  misc_feature (218)..(218): n is a, c, g, or t
  misc_feature (248)..(248): n is a, c, g, or t
  misc_feature (260)..(260): n is a, c, g, or t
  misc_feature (270)..(270): n is a, c, g, or t
  misc_feature (303)..(303): n is a, c, g, or t
  misc_feature (309)..(309): n is a, c, g, or t
  misc_feature (340)..(340): n is a, c, g, or t
  misc_feature (342)..(342): n is a, c, g, or t
  misc_feature (353)..(353): n is a, c, g, or t
  misc_feature (379)..(380): n is a, c, g, or t
  misc_feature (398)..(398): n is a, c, g, or t
  misc_feature (421)..(421): n is a, c, g, or t
  misc_feature (434)..(434): n is a, c, g, or t
  misc_feature (445)..(447): n is a, c, g, or t
  misc_feature (506)..(506): n is a, c, g, or t
  misc_feature (514)..(514): n is a, c, g, or t
  misc_feature (516)..(516): n is a, c, g, or t
  Coding DNA Sequence Number=SeqID_5429
tgtacgttgccgtgagtcccagagacgacagaggtggtgtggtctcctaagaagacggccgcgaaggttcctcttcanagangaaggtttccgtgcgtatgcggttgntnntagaagcgcgttaccgtcccctcnngtagagcgtgcctggcgagtngcgagtgatcggtgctgngtctccctctcctcgcccgcgaagcagcncctcgtttggcgcnagactctcgtgccgtgcacttcgctgcgcnctcgcgaccganctagaaaggngatttttcatcctcacccgtctcaggtaatcgnttcggnccgcgagttctcatcggggaggatatacggngngagagtggcgncgctctccgagcgaaagccggtcagnnaacacaccgtcgtcctcntgtctccgctgcttcgcgtgaanaggaggcgcgcgnatgaagaggtnnngcctgcgctgagagcggcaaaggcgcataatcatgtatcgcgcggctcactatatgtgntgtcttanangtatttgtatatggatactaacacaggagagaactccgcgagtcagct

SEQ ID NO: 15209 - DNA, 550 bp, Glycine max
  misc_feature (26)..(26): n is a, c, g, or t
  misc_feature (138)..(138): n is a, c, g, or t
  misc_feature (158)..(158): n is a, c, g, or t
  misc_feature (184)..(184): n is a, c, g, or t
  misc_feature (188)..(188): n is a, c, g, or t
  misc_feature (194)..(194): n is a, c, g, or t
  misc_feature (378)..(378): n is a, c, g, or t
  misc_feature (418)..(418): n is a, c, g, or t
  misc_feature (481)..(481): n is a, c, g, or t
  misc_feature (483)..(483): n is a, c, g, or t
  misc_feature (490)..(490): n is a, c, g, or t
  misc_feature (497)..(497): n is a, c, g, or t
  misc_feature (516)..(516): n is a, c, g, or t
  Coding DNA Sequence Number=SeqID_5430
tcgactcgactagataccgtctcatncgtctatacgacacatctgcgcgtcgatgcgatgatcgtgtgagaggacgatactatgagactatacagagatgagttatcgcgagagctctatctgtgttgtggatgtgantaatatcgagtcacgctacnccgtacgacatcgtgagtctgcaatnatcngtatangtacacgccacgtcgctcctcacagccgataactgcgtgacgtgctgtgctatgcgtctctgcatgagctccggcatctcgtcatacgctctctcgcgtctgcgttatactgatctagtcatagacatcatactccgcgcgtgctcgtgtggcgcgcctgccgcgcgatgcccacatcacacancaccactcactacgtcagcactcgacgcatatatatcgcngattcactagtcgatgatctcatatagtacacgagcgtcggctgagaacagcgctgcgggctngnaccgcanctgacanggaccgtacgctgcacttncgtcatatcgactgatacgtattcgttcatactg

SEQ ID NO: 15210 - DNA, 341 bp, Glycine max
  Coding DNA Sequence Number=SeqID_5431
acgccatcctcaaggttactcttcgccgctcatgtttcatttcccttcagtgcttttcaactgcatctggttttagctctttgtgacctccgagatgcttctgctttgcgattcgattttggaactgattttaaaggaagaaaatgtggctgtatgaatttcaatttccacttataggctagtagatcatcacaactattgaaatggtgtcactggattgaaatgttggagttagtttgaagtaacctcaatgcttcgcgcttggatactcggaaaatgagaacatgttatttattttattttttttttattttgaatgatgctcgaatcacaatgtcaag

SEQ ID NO: 15211 - DNA, 530 bp, Glycine max
  misc_feature (26)..(26): n is a, c, g, or t
  misc_feature (46)..(46): n is a, c, g, or t
  misc_feature (65)..(65): n is a, c, g, or t
  misc_feature (68)..(68): n is a, c, g, or t
  misc_feature (76)..(76): n is a, c, g, or t
  misc_feature (98)..(98): n is a, c, g, or t
  misc_feature (114)..(114): n is a, c, g, or t
  misc_feature (222)..(222): n is a, c, g, or t
  misc_feature (389)..(389): n is a, c, g, or t
  misc_feature (452)..(453): n is a, c, g, or t
  misc_feature (457)..(460): n is a, c, g, or t
  misc_feature (464)..(466): n is a, c, g, or t
  misc_feature (469)..(469): n is a, c, g, or t
  Coding DNA Sequence Number=SeqID_5432
ttaatatagtatagcgagagccggancgacgttatatcacgatatngatgaatgagcatcatcgnagncacagctncgacgctatgatatatgtcgcntatataaagtgattanatgatagatagatattgtatgctactataggagcgaatgtctctggtagatagatagtgtgtagtttctcttatgtatctatcatcagcgtagttataatacacaaancatacaggtggacgaataagagtgatagccaataggatatataccaatcatatatagagtgatgtatataaatctccttattgtctaaagtactatgctcatcgcataggcgaggtctgatgtgtaacacgcgcgttgcgacctaggcgatatgtgtcgtgtgtatntttatatactatcgtccagtcgattgttatgttagtgattattatatcacagagagagggaanngtgnnnnctannnaancccatcggataattattatagaacatgattatgaaattacacgctagatttaataacacct

SEQ ID NO: 15212 - DNA, 525 bp, Glycine max
  misc_feature (63)..(63): n is a, c, g, or t
  Coding DNA Sequence Number=SeqID_5433
ataccagcggtcgatccagtcatattgtcggtttcttcgccgacctgacggcgcggcgcgagnccgaggagcgcctgcgctacctctcgcactacgacgacctcaccgggctggccaaccgcagcctgttcaaggagcgtctgcatgaagccagccagcgcgcacggcagagtggccgcagcatcgccttggtgcacatcgatctggatcgcttcaagctgctcaacgacagcctcgggcatgaggtggcggaccagttgctgcgccagataagccgccgcctgacccagaccgtacccgaggccgactgcatcgcgcggctgtcggctgatgaatttgccatcatcctcgatgcctatggcagcctttccagcctggcacgggtggccagtcggctgctggccaagttgcgcgtgccgatgaccgtcggtggccacgagctggtgatcagcgcctcgctgggtatcagtctgctgccggactacgcccgcgagatcagcgcgctgatcagccaggccaacatgg

SEQ ID NO: 15213 - DNA, 587 bp, Glycine max
  misc_feature (40)..(40): n is a, c, g, or t
  misc_feature (43)..(43): n is a, c, g, or t
  misc_feature (128)..(128): n is a, c, g, or t
  misc_feature (217)..(217): n is a, c, g, or t
  misc_feature (350)..(350): n is a, c, g, or t
  Coding DNA Sequence Number=SeqID_5434
acaggacgatggcatcaccgactcaccacctacctatgantgntcctctaccctgagagccatacgagcatacataaactgacagcgtcagagaggtcaggtcgtaccatgcgtggaagaatctagtnagtgcactattgctctctatcaaggcgaagatgagtctatagcaagtcgtgcgagtagagacagcatgagattcctacatcgagagtgncgctcaagtgaactgagctatacgagagacacactggcatgcgctactgcacggcgcgctagtgtgctactatttctcatcccggagagaacacttagagtgttctgcagcacgtatgcgacgtatcctcgtnagcaagtcaatagagagaacctctgatttgtgctcacgctccacgtaagacacgggatggctgggctacagccgtaacacacaagcaggaaaggcagagagcaaagacacagccattcagaagccgccccgcatcgccgatagcagcatacgtgccaaaatccaggacggggccgcgcgacgcccgaagctagttggtatttatcttgtggtggtccaagttaatcgccagcgtgaa

SEQ ID NO: 15214 - DNA, 478 bp, Glycine max
  Coding DNA Sequence Number=SeqID_5435
ggccgtgtcagctttcgagagtataccgacttcttgtgtagaaccaccggtttcgcttgggtccatagcgagatgtttcaggagctcgaccggaatagagacggccagcttgacttctgggaggtcttgacgctttactatgtggctcggacgcggaccattggctgccgcacgtgcctccagcctctcattggtttgtactttacgtgtgtaacgtgctttgaatcgcaatgtgttggcgacacgtttgatctctgcgtcaagtgttatatgcggcggaattataatcatccgcatcgtgtcttcctggatagttttgttttattacgatctaagcgtagccaccctcctatgttgcaggagccgcctggcgaccaaaacatgcccgaacaacatcctgggatgatgggatggtgcaccgcgttgtcagcaatggaagctgcatttgctgtgggatcttttgctggcttttgcacta

SEQ ID NO: 15215 - DNA, 202 bp, Glycine max
  Coding DNA Sequence Number=SeqID_5436
tgagcgtactggctccctgatgctagatggcacggggtgggtctcactcatagcgtgctcactacgcttacatgaagcatgtgggtctactatacgatatggccgattggattagacgatgcttgtgatcggagagtactcgtgatatgcaggtggtgcagtcgaagaattgtttggcaaccgaccgtggattccgtggtag

SEQ ID NO: 15216 - DNA, 584 bp, Glycine max
  misc_feature (465)..(465): n is a, c, g, or t
  misc_feature (477)..(477): n is a, c, g, or t
  Coding DNA Sequence Number=SeqID_5437
taaacggcgtaccacacttaaatgtacttatattatatacacaaatttgaatatacctcgcgggtatatacgtattatatgtattatgtataatcaataataacgagttagcaattctcccacctttgaacacacgtccattatgagacgaccccgcatcccttcgagcactcacactccgcaaaattaaacaatctcatggccgtgcccccactctccataacattgccactgtcacacatccttgcactctaccccgctctgtcttccccactcactcttctctcacatcgcctcttacctctacaacacaacacaccccggcgccatctcacagcgaggcctccatacaacacctctggcacagtccactcactctctcgcctctcacacacacatggcacgccactgggctctctcccacattcttacctcttactcgccactgtcacaactctggagttncgcatacatctnatcatacagacgtttgaccgcttctgtcttgtgatacacgttctctatgtatatttatgtatatgtacgcctatctcagcattcttctttctccaatgtagtctctc

SEQ ID NO: 15217 - DNA, 528 bp, Glycine max
  misc_feature (503)..(503): n is a, c, g, or t
  Coding DNA Sequence Number=SeqID_5438
gttctcgcaggcatcgtcgttgtcacgttcctgctgacgcgcgcgctccccggcgaccctgcggcctacttcgcgggaccgagtgcggatgcgcattcgatcgccgagatccgcaagagcctcggtctggatcgctcgctccccgagcagcttctcgtctacgtggggcagctcgcgcgcggcgatctcggccagtcgatctcgacgggacaacccgtcatggaggagttggtgcggcggcttccggcgtcgctcgagctgacgcttgcggccttgatcctctcgatcggcatcgctgtaccacttggtatcctggcggcgacccatccggactcgtggatcgatcacctctgccgtttcctcacgacggcgggcgtgagcctgcccacgttctttaccgggctcgcgctcgtctatctcttctactatctgctcgggatcgcgcctgcgccgatgggtcggctcgatatcgcagttctgtcgccgccacacataaccggttnttatacagttgacgcgctgctcgcc

SEQ ID NO: 15218 - DNA, 550 bp, Glycine max
  misc_feature (242)..(242): n is a, c, g, or t
  misc_feature (520)..(520): n is a, c, g, or t
  Coding DNA Sequence Number=SeqID_5439
ttacgcataatacacacaccagagtgtaggattgaccacactccgcccacatctcttatatatttatagtgtcggtcgcccacccacccgcaccccggcgccggggcttctcacacacactctcttatttgcttctacttgtgagacgatcgtcatcgaaacaatttaatagagatcacatatctccctccataccttccccgttacatctattcacctcctcgccaccttacgcacattanaacatgaaatacaaaggaacatacgtacgcgttcaccacgtggagctctctcccggctccatgtacacgctccatgcaatgacgctttgataccatataatttctctgtctctgttccacctctcgacaccacccgccacacacaagtgaactcgactaatactatcgggaggcacgatataatcacgtgttctatcactagtggacattatcattgctgaactcgctacacttacgagtgaataggggagtgatgactgaatgggtagtaaagactnaattacgtccacacaccactagaatagcta

SEQ ID NO: 15219 - DNA, 459 bp, Glycine max
  Coding DNA Sequence Number=SeqID_5440
tgcaaccaaactttgacctccggatttattgtacaatttaatccaatcctgacaataatatcaccaccgcaccgacacggagtgcacggagctcttcattcaaagagtaacgcctctccacagactagtacttcattttgcaccattgctatctcaaatggctcgtgcttcgactaactggctatcgttctctctctcccccatggaaattctcccaaccccctgaacctcattttgcccaataagacgccgattccgacacttcattgcatcactactacctcaacaacttgcacaccaacgggtgggggaacgggagcctcaagttcgatcagaatctgaaccacagggacgtgagttatgttgaattgtcggcgcacagagttacgctcgcaccaacccggctggaggattatctcggggactactccgctggtatgcgttagtccgacagccata

SEQ ID NO: 15220 - DNA, 326 bp, Glycine max
  Coding DNA Sequence Number=SeqID_5441
tatttttcgcttactttctttcattgtttcacagtctacaaaaatggaaggaagacaatactaccctccaagagaaaccgtcgacggaaacagaaccaccatgggaggaccgcactcgccgtggcattcaccggttccttatcttttcggtggtttagcggcgatgcttggtctcatcgcctttgctcttctaatcctcggttgctcttattggcgtctctctggttacttcgacggtgaggaaaaccagagcagagacagcgatcttgaagccggagatatgaaacctgatacagctgtgaaggctgtagctttgccggagaagt

SEQ ID NO: 15221 - DNA, 568 bp, Glycine max
  Coding DNA Sequence Number=SeqID_5442
caaaatgcaccactcatactagaagatatcaagaagtttctcgagaagagagatttctgcgattctatccgtgtctgtggaggcaaaattgctcgccctccaggaggaggtctgagaggcctgtctactgtgtgagctctttcttttcctgaacacgcatgacgattgcgtggcatttaatgaagaacacgggggctatctgacctcacgcggtgatgtttagaagaaagattggtggtgtaagtctacgaacgaaaagatcttccataatgctatttccgagcagtgtactccctccgtcccataattcttgtcttagatttgtctagatacggatgtacctaacactaaaacgtgacttgatacatccgtatttggacaaatctaagacaagaattttgagacggagggagcatatattatacagcattggcattgtacctgtggagaagtgtatatattatcacagtcatcaaatgaaatttctgtgatagttgttgctacatgatcgttcatggaacgtaagcaaaatgtatgcttaaagtgtagagcatatacgcgtgtaaac

SEQ ID NO: 15222 - DNA, 525 bp, Glycine max
  misc_feature (75)..(75): n is a, c, g, or t
  misc_feature (137)..(137): n is a, c, g, or t
  misc_feature (210)..(210): n is a, c, g, or t
  misc_feature (255)..(255): n is a, c, g, or t
  misc_feature (319)..(319): n is a, c, g, or t
  misc_feature (340)..(340): n is a, c, g, or t
  misc_feature (346)..(351): n is a, c, g, or t
  misc_feature (353)..(353): n is a, c, g, or t
  misc_feature (464)..(464): n is a, c, g, or t
  Coding DNA Sequence Number=SeqID_5443
attatctgatgtgacaatgctaacaatagtgagcgtttcataaagattaagagagcatgagtgacgagagagacncgaaacatccgtatctgatgaatgagtacagcacagcgcgcgcggagtccaacgcgggtggnaaaagactacacctgccattatccatcatcaacattcacaatacactaggcgaatagataaatcgacacgatngccatctacagagctacgataaccacacgagagcggcccgcgcgncggcgcagactggaatccggcgcgtcccgaaacgcggccctccgacgatgtcgcagtagatcgnggtctggccgtatggagcagntggctnnnnnntnaaaggagcttccaaataaaccatttaagaacataatgtataaagcacagtctcaagtacttacatattcgctaagcaaaacgacaaatcatatggacactatcacactctngagaacaccaactcattaactataataattatgcccgcttacatgcgtccggcagcgcaca

SEQ ID NO: 15223 - DNA, 550 bp, Glycine max
  Coding DNA Sequence Number=SeqID_5444
cctggagacgtctgcatgggtcgcagggttctcacccgactttgaactgctcgagtgcatgagtaatccgccggacgtggccgatgaactcagtggcttgcaagttgaccggtcggccctcaccaaaattccactgcgacatcacccttccctcgcgactatcaacgcacgcatgccttaaaaagacgctcaggcaacacacgtcccggacatggaccatgaagcatagagcgactcgtctgctgggcattctgatttcgctatctggcgttttatcgggctgtgggcacggcgtgctcgatccggcggggccgatcggacactcagagcggatcattctcctcgactcactcgccatcatgcttgcgattgtcgtgccgacgatcctgtgcacgctcgccgttgcctggtggtatcgcgcttcgaacgagcgcgccacctacgcgccgcactgggccgaatcgggtcggctcgagcttctcgtctggtccatacctgcactcgtcgtgctcttccttggcagcattgcgtggatcagctcgcatgagct

SEQ ID NO: 15224 - DNA, 582 bp, Glycine max
  misc_feature (277)..(277): n is a, c, g, or t
  misc_feature (281)..(281): n is a, c, g, or t
  misc_feature (445)..(445): n is a, c, g, or t
  misc_feature (495)..(496): n is a, c, g, or t
  misc_feature (506)..(506): n is a, c, g, or t
  misc_feature (531)..(532): n is a, c, g, or t
  Coding DNA Sequence Number=SeqID_5445
gtttgtgagttatagttcgtctgagaatgatatggattagtacgtttatgattaaatgtttgatagttataattggtgtatatgttggttggtgatatcgtttgattagttattttattatgtttgggatgtttatttatatataattaatcttaattcgtcgtgcgggcttggagtggggatatatatctcgtgagtgcagtctggaggagataaaagtgagagatcagggaggtgagaaaggtagcactaactcaacgagaatatccaggagatnttgngttgagatgtcgttcgaagatagagtggggtgaagtgatattagggggagggagataggttaatacttggtcgtttggtggtcctctttctcgcgtcacagacgcgtggagtggagaaactaaaataataatacaattgaagaaggcgtggacttgggttaacntctgttgtggtattggagtgtttgtagttatatttcgtgcagtgcgtttnnaaataaaaanatttaaaaggggcagatgaataatnntagtataataattattataatttttgtatgttgtcgagttatttattaaa

SEQ ID NO: 15225 - DNA, 584 bp, Glycine max
  misc_feature (87)..(87): n is a, c, g, or t
  misc_feature (151)..(151): n is a, c, g, or t
  misc_feature (168)..(168): n is a, c, g, or t
  misc_feature (175)..(175): n is a, c, g, or t
  misc_feature (181)..(181): n is a, c, g, or t
  misc_feature (289)..(289): n is a, c, g, or t
  misc_feature (293)..(293): n is a, c, g, or t
  misc_feature (323)..(323): n is a, c, g, or t
  misc_feature (485)..(485): n is a, c, g, or t
  misc_feature (526)..(526): n is a, c, g, or t
  misc_feature (551)..(551): n is a, c, g, or t
  Coding DNA Sequence Number=SeqID_5446
caacaaccaaattctgtcgagtcagctacgatcgttgacacgacatacgtacgtaatgttatacgcgagacagcgatgcgaatagangatgtatgcacacatccgcgcggcgcctacgccacagggcggagagtcaatgtcaaggtgactnggagacacaccacattncgactgntcatgncttctcttggctatacccacgcgcgcaccctcgggactctgcgtctgatctatcctgtctatatcaacgtacatacctcgacacgctcgcccaaagacacacaatatngatnatatatgatatgtacgataaacgtcacacncctctacagacatgctatactcgaacgcgcactattatgcggcgcttcctactctaccatacactctctacactcctccgtccacggctctcatcacgccacgcgcatcactacatcacgcatacatgatctcaacaccaccatctcgctacaaaacaatangaagtaattgtgatcgacatacacatcacggacatataaantagtatgcacactcacaccgcacantataccccatcacttcactatactatccacaca

SEQ ID NO: 15226 - DNA, 539 bp, Glycine max
  Coding DNA Sequence Number=SeqID_5447
gtatcatgaacgatgcccagggctccttctacttctataagggaattagctgcaagaacaccaaggacatctccaccgcgattcacttcttcagcctggccatcgagaagtatcagttggccctgacctccaccccgaactccaaccacatcctgcgcaacatcgcagtctctttggttcgtctcatcgagctccagaagctctcgggctccacctctccaccgcttgggggacttggggcactgccttcctcagccaacggaatcgaagagacagctcctcataacggggagatgacggtggccttctcgttggacgatccccaggtccaagaagctatgaggtatttcaaccgagctcttgaggccgagcccaaggatccttgcaccctctaccactatgccaagttcctttggcaatgcgatcgccttgacaaagcggagaaggtattcttgaagtgtctcgaagccgaacccaactacatcgtcgctctggaggactatggaaacttcttgctcgccttccgtaaggatgactta

SEQ ID NO: 15227 - DNA, 566 bp, Glycine max
  misc_feature (478)..(478): n is a, c, g, or t
  misc_feature (524)..(524): n is a, c, g, or t
  Coding DNA Sequence Number=SeqID_5448
tctgctacttgcgagcgttattgtagataggggtgacgcggctctatggttgtactgcgccatgggctggtggtcaactcacgcgttctggtcacatcttctcgatctctgctcttttggattgtgtttgaattccggcggtgacctctcctcctatgctctcgggtatcgtgcgggtcgggcgggctgtggatagtatgactttcgttagtcgcggtgtctatccgtgcctatattacttgtgtgcgctcctggagcgctgcgcgtcgatactggtgctgtgtgtgtcgctgtggtcgccgtaacgcgcgccaaggtgcgacgtgtagattagtgtcgtgattatccgcgcgtcgctgccgtgatgcgtgccggcgcggcgtgctgtgttcgcgtggtgtgctgtggctgtgcgcgctctgtgcgcgggcgactgttctggccgcacgcgcgtcgtggattgtgtgtgtacgtgggnagatgcgatgtgtcggacctatcgtagagggcgctgatcacagtcnactgtactcactatgacatatgatgtgtctccgtctatctcg

SEQ ID NO: 15228 - DNA, 581 bp, Glycine max
  misc_feature (385)..(385): n is a, c, g, or t
  Coding DNA Sequence Number=SeqID_5449
cctaagtggtgacatgggcatgctagtcgattactggcggggggggaggctgctaaagaaataaagaacaagttaacaagtatcttgatgcaatctttttgattgaaattatctcaacatatgatatgttagatccgtgttatatgtaataactaacttatgctagtgatactgcgcttactcatcgtatgcaataatgtaatggtgcatacgtatataaagactgaaacttgcgtcatgcgtaacatagagagtctgagacgttgaattcgctttctacctatttagggagatttgatgtgatccgttcatacaatgattttctgatcgtagctcttacattggtttgtgtgcagcgcggcagatttcgacatctgtggtgcgnatctgctctgttacatgtttatttctgggagaaaagaatatacatacatccaggtcgatggaaatcacgtaaacttgtgatcgttggaactaatatattcgtgagatttacacagaatggtgtatgtatttttatgcgtaataactatatagtcatcttataaaggtgaggtgggatatgttaaacggcacgcaat

SEQ ID NO: 15229 - DNA, 531 bp, Glycine max
  misc_feature (469)..(469): n is a, c, g, or t
  Coding DNA Sequence Number=SeqID_5450
cgcataacctcacatctcatattagtgagacgattctgtatagatatatagtacataaccagactaattgtatataaatttaataggtggagtcccggacacgtctctcgctgcgcgacagcatctatcccccacgcccacccgcgcacgcaacaccaccacacacaacccagcatccgacgtccgccgcgcctcctatatatgtagttagtataaatactagaggagcgattcgtggccgcgcgccgcgtttctcgccacggcaccctcccaccacacccacactatcgtgacaccgaagctgacatacaactcgcgtgtagcgctagacggacgtacgaggaagatcactgaaggaggcacagaaacacgtacgcatagtagacagagaatcacagcaagtacgaggagggcgcagaatagccatcctcaagaacaagccgacaaccatccccacccactcgtcccntcgcacctcatggttcgccctgccagtgtaccgtgaggcgatgatgcctctatttctttttc

SEQ ID NO: 15230 - DNA, 289 bp, Glycine max
  misc_feature (104)..(104): n is a, c, g, or t
  misc_feature (156)..(157): n is a, c, g, or t
  misc_feature (162)..(162): n is a, c, g, or t
  misc_feature (166)..(167): n is a, c, g, or t
  misc_feature (187)..(187): n is a, c, g, or t
  Coding DNA Sequence Number=SeqID_5451
aacagctcggccaccttttgcagttaagccatggccgccccacggacttacttggatttcggccgtcgcaggactcgtggaaggacgccgcaaagcagaccttngtcgtcaccctccccgggttcaagaaggagcacctgaggtgcagatcggcanntacgncggnntgagggtcagcggcgaccgnccgctcgagggcggccagtgaacccgctccgcaaggaagtccagttcccgaggggctgcaacgccggcggcatccgcgccaggtcggagaagacgggcgtct

SEQ ID NO: 15231 - DNA, 297 bp, Glycine max
  misc_feature (37)..(40): n is a, c, g, or t
  misc_feature (51)..(51): n is a, c, g, or t
  misc_feature (65)..(65): n is a, c, g, or t
  misc_feature (70)..(70): n is a, c, g, or t
  misc_feature (76)..(78): n is a, c, g, or t
  misc_feature (84)..(84): n is a, c, g, or t
  misc_feature (89)..(89): n is a, c, g, or t
  misc_feature (98)..(98): n is a, c, g, or t
  misc_feature (100)..(101): n is a, c, g, or t
  misc_feature (104)..(104): n is a, c, g, or t
  misc_feature (108)..(110): n is a, c, g, or t
  misc_feature (112)..(112): n is a, c, g, or t
  misc_feature (115)..(116): n is a, c, g, or t
  misc_feature (119)..(120): n is a, c, g, or t
  misc_feature (123)..(123): n is a, c, g, or t
  misc_feature (142)..(142): n is a, c, g, or t
  misc_feature (235)..(235): n is a, c, g, or t
  misc_feature (238)..(238): n is a, c, g, or t
  misc_feature (251)..(251): n is a, c, g, or t
  misc_feature (253)..(253): n is a, c, g, or t
  misc_feature (256)..(257): n is a, c, g, or t
  misc_feature (259)..(259): n is a, c, g, or t
  misc_feature (269)..(269): n is a, c, g, or t
  Coding DNA Sequence Number=SeqID_5452
cttcttacacttctactctctcaatcatacataatannnnaaagattgganaaagactactgatnagagncctcannntatcgnacganggtacagangnnacncccnnntncanntgnncancgatgacgcttatgaagancaccaccatggatcatggcgatggctcctttttcacttgcaatgaaaatcaaaagcaatcggcgaggacattaggcgccactccggctattantgntctggatgaccgncnccnntncgttccgccncttcaccaacatcgtccgcgcgtgtgaa

SEQ ID NO: 15232 - DNA, 550 bp, Glycine max
  misc_feature (393)..(393): n is a, c, g, or t
  misc_feature (401)..(401): n is a, c, g, or t
  misc_feature (403)..(403): n is a, c, g, or t
  misc_feature (432)..(432): n is a, c, g, or t
  Coding DNA Sequence Number=SeqID_5453
cagagtgcgtgtcacattatgttatgatatctattgtcgagtatgttgtcaagcgagttggttgtcaagtctatgctctttcaagaagagcatagacgctggtgatgttcatgactcagtatagagacgacagctcgacatgtgagcacggaagtgatgcagatatgacctacagaccaatgccgcaacgtcactcgcacactcccatctgatcgtaccggttgtcttagtgacacatactcgttgtcacgaggctcgcgcaccgagtagcccccgaagccccgagcaacgaagagaaataggagcgaagttgtgtacgtgtagtgcgcatcacgccgatcctacgcgcacacgagcatcgcgacgcgtagtggcaggggtgatggggtaggnaggtactntnggacactccagcggtcagacgagtcgcancactaatcagagcatcagtcatcaacagaccagacgagataagagagggagaggagggcgaactaccgcgtacggagtgccgagctggtggtgtagaggccacgtgtgcgacccgtat

SEQ ID NO: 15233 - DNA, 355 bp, Glycine max
  Coding DNA Sequence Number=SeqID_5454
gcaaaagaattgtaaaccccatgagttgcgaacaatgtgcctgcatgtgttgcacctgatccattagtgacgtatatgagaagcagaattgcaggctctgacaggaactggaacagggaagcgcatggaatgggaccgagtttatgattatgatggttacaatgatttgggcactcctgactgtggtgaaaactttgctcgtccagttcttggaggatctctcactcatccctaccctcgtaggggaagaaccggttgaaaaccaaccaagaaagatcccaacggggagaaacctggcgaggcgtttgtgccaagagatgaaaattgcgggcacttgaactcatgtgatttcctt

SEQ ID NO: 15234 - DNA, 275 bp, Glycine max
  misc_feature (35)..(35): n is a, c, g, or t
  Coding DNA Sequence Number=SeqID_5455
caaatctctggtaactactatgctttgagtaccanaagctgcaatcgataatgccttatttgactccaaaaactttaacttatctccaagtccttcttgtatgtaagtaacatcaccattctcttccatagctattaaatgattaaatccagcaacaatttcagtgatatttttcgttgataattcttcaacaatctctgccttatcttcttcaagatcacatttaaacacttttccttctcttgatagagcaaaaatatcgctccatcctgcaa

SEQ ID NO: 15235 - DNA, 575 bp, Glycine max
  misc_feature (37)..(37): n is a, c, g, or t
  misc_feature (83)..(83): n is a, c, g, or t
  misc_feature (85)..(85): n is a, c, g, or t
  misc_feature (168)..(168): n is a, c, g, or t
  misc_feature (188)..(188): n is a, c, g, or t
  misc_feature (242)..(242): n is a, c, g, or t
  misc_feature (261)..(261): n is a, c, g, or t
  misc_feature (306)..(306): n is a, c, g, or t
  misc_feature (329)..(329): n is a, c, g, or t
  misc_feature (407)..(407): n is a, c, g, or t
  misc_feature (421)..(421): n is a, c, g, or t
  misc_feature (452)..(452): n is a, c, g, or t
  misc_feature (480)..(480): n is a, c, g, or t
  misc_feature (484)..(484): n is a, c, g, or t
  misc_feature (489)..(489): n is a, c, g, or t
  Coding DNA Sequence Number=SeqID_5456
tcttcatttctatccgacgttacgattgtctgcgtgngtgcacatgaatagatagttatattcgcgctgtgataaagacagananaggatagtgcctggcaaatacgtggtagatgtacgatacccttgatcattctctgtgaatcgcgcacgcgacacgtatctcanccgtagcgagcttcttccantgcgactatgccccagatataattcacattgcgcagcgttcacgaccgagcgcnactcgtataaccatcatantgatctctagactgactattcatactccgtattactcacgtagcncgaagtcgatgttatgtcatgantatatcgcgcgcggcgcgcgcggtgcgatatctagttacgcgtgatctgtattatatataatagccacgtgatctaancttgatacgtgcgnctgcacgcgtctcgtcgcgtcgtcggatagncgctgaccctactgcacacacgtcatantatncgccngctgacgtattgtcgcaccgcgcgcacatgtacggtgtctgaatatgtgtatatgctatctcgtagtcactgcgtagacaggctgc

SEQ ID NO: 15236 - DNA, 508 bp, Glycine max
  misc_feature (26)..(26): n is a, c, g, or t
  misc_feature (232)..(232): n is a, c, g, or t
  misc_feature (348)..(348): n is a, c, g, or t
  misc_feature (377)..(377): n is a, c, g, or t
  misc_feature (397)..(397): n is a, c, g, or t
  misc_feature (399)..(399): n is a, c, g, or t
  misc_feature (419)..(419): n is a, c, g, or t
  Coding DNA Sequence Number=SeqID_5457
tagccctcccgcatcgtggtaatctnttgagtatcacaatctacatcctagagtgtagacgcacaaaagctcagtaatatttatagagcaggtgcattgcgatcatgaacgcggctgagaggagagaatacacccaaggaaaaatatataaaagacacaaagactagcatttggattattgtattcaaatctcttcaaaaaactttcataataactaaggagagagaaaatntagaaatattttatttttagtaaatctactatagttatgtgattgaaaactacttctttatatcatatctaataatagctagattatgatcacatgggtcatagataagttggtgngcccggcaggcttgtgtgatgatgaccanatagaagatggaggagagananggacagagacatatattctncggtcgtgtcctctcgctgtcgtgtatgtgccggtttagtttcttctatattatattgtgatataagtgtgcatgttgtagctgtcagt

SEQ ID NO: 15237 - DNA, 540 bp, Glycine max
  Coding DNA Sequence Number=SeqID_5458
gaaccaggtcgttccttcgaattggccggacgacgcggaacgcctcagtctcacgccttcccctgactcccgctcacccccaatctcagcgccgccaccccctcgtctctccccactcgatctgcgacgccggcggccaccccccctcgtctctccccctcgatctgcgacgccggcggccacccccttgtctctcccgctcgatctgcgacgccgccgaccgctccctcctctctccctcttcggcttcgactatccctctctaatggcgtgcaccagcagcgcgacagcagactagcagtgcgagcagaggcggctcgcgtggaagagaggcttggcgacggcccatttggccgagagcgagccggcaaggaagccgttgcagacctctgcgccatgggggtgttcaccgcggtgtgcgtgctgattgttctggtgctgtacgccgtgcagttcgagagcttcattttcttttgctagtaaaaaagaaggaaaacttttgctactgattgtaaactgcaattagcaaatgcgtgtgtt

SEQ ID NO: 15238 - DNA, 500 bp, Glycine max
  misc_feature (366)..(366): n is a, c, g, or t
  Coding DNA Sequence Number=SeqID_5459
agcagttggcaaggtggctccctataatacattttactcccaattggaagagcatatgaatgaagttggaattgtgcccacagttaaccgatgggatgagcctctagcattgggcatggttgatccccatgattcattatctcatccagcgggtgtctccgaggttcaagctgagtctgctacacgggtggaccctgatcagttcactaattttgtgattccaagctggcttggagcagagtccactggggctacaaaagacaatccattcacgttaccagatgcgtatatggcatctcagcataaaaatcacaaaaatttataggatataaagcaactcttacgagaaacatctttacaagaaantcgcaaacgataattatcatctacactccatatctacttcaaagactaattatatactgtcaaaaacattcatcaactttactatctacacaataattaatctttatcagtcaatacaataactcactaaataa

SEQ ID NO: 15239 - DNA, 543 bp, Glycine max
  misc_feature (277)..(277): n is a, c, g, or t
  misc_feature (288)..(288): n is a, c, g, or t
  misc_feature (335)..(335): n is a, c, g, or t
  misc_feature (473)..(473): n is a, c, g, or t
  Coding DNA Sequence Number=SeqID_5460
gaaacaccgcgccagacacgttacggcgggcgggtcgttgttgagcgggtgtgggggtatggtggtgacacgccaataaggcaggagggggaaacgtgtaggggagaaggagagggggagatctgcgtattggataaagtaaagtatggagggtgtgggaggttgtggagaccgatcttcgcattcactatagtttcctagaggtgagcgggctggagtagcaagagagaagcgccacagagtagtcgaataggtgcggggcggcaagccaggacanagcgttggagngagaaaagagtaagaaacaaggaatgagagaagatggaggagggatngtcccgggttgtgggagagaagagacggtgcgcgaccagagtgattagtggggttgcgttggttcctcaccccaggtagacttatattgtctctaaaaaacaagcgcggacgtcctctttcggagagaagaggttccnttgtagaaatgttgcggcgggccgggcaggtggattaaagagagagcacatcggagtaagaatgcaagat

SEQ ID NO: 15240 - DNA, 545 bp, Glycine max
  misc_feature (133)..(133): n is a, c, g, or t
  misc_feature (257)..(257): n is a, c, g, or t
  misc_feature (260)..(260): n is a, c, g, or t
  misc_feature (402)..(402): n is a, c, g, or t
  misc_feature (434)..(434): n is a, c, g, or t
  misc_feature (437)..(437): n is a, c, g, or t
  Coding DNA Sequence Number=SeqID_5461
aaattcgatgagagacagcactgtctccggcacctccccgcacacccgccgtgatcagggtgtgtagatgtcatcagtcttgtcattagtggagatacttgacggagcaccttatcatactgctcagtgtgtnctcgcgcacacactcgcgacatgctactaacactccgtcatctacgaatccgagaggagatatattgactgcacgtatcgcctctcagtatacgcacatggaattatgagtgcactagatctangtngcggcgtgcctcaggctagcacggaggcatatacgatatctgtatatctagagacatccgatgacgagacaagtatgagtgtgtatgctatgtctctgtacttaactatagtcatgctgtgctcctcatctcgtggtgtgtngagagacactctccgtcttaaggaataattanacnacactatcagtgacaatgtccgaatataaaccacgtaagctgggagatctcctatctgtcgcacacatacattcctaatgcatgactcctgcacccacagatattaga

SEQ ID NO: 15241 - DNA, 585 bp, Glycine max
  misc_feature (61)..(61): n is a, c, g, or t
  misc_feature (63)..(63): n is a, c, g, or t
  misc_feature (187)..(187): n is a, c, g, or t
  misc_feature (190)..(190): n is a, c, g, or t
  misc_feature (204)..(204): n is a, c, g, or t
  misc_feature (229)..(229): n is a, c, g, or t
  misc_feature (238)..(238): n is a, c, g, or t
  misc_feature (262)..(262): n is a, c, g, or t
  misc_feature (312)..(312): n is a, c, g, or t
  misc_feature (317)..(317): n is a, c, g, or t
  misc_feature (319)..(319): n is a, c, g, or t
  misc_feature (350)..(350): n is a, c, g, or t
  misc_feature (376)..(376): n is a, c, g, or t
  misc_feature (444)..(444): n is a, c, g, or t
  misc_feature (467)..(467): n is a, c, g, or t
  misc_feature (473)..(473): n is a, c, g, or t
  misc_feature (476)..(476): n is a, c, g, or t
  misc_feature (490)..(490): n is a, c, g, or t
  misc_feature (552)..(552): n is a, c, g, or t
  Coding DNA Sequence Number=SeqID_5462
gcttatatatactcactctcgtgcgtatacccgcgacatctgaggtcatgcgtcccgcgtntntgacatcaggactcctgtcgtcatgttgacttctccaatctgtcagactatcacatgtcgtctctcatatctactcgctactttactgtgctcggcagtcacgctaccccttcagtacgtgtcngancacatgtcgcggtncatcaagtggcgctgtgagtagctncccgcatcnacactacgcactacgtaatcatantgcatccacacttgctcaatctagatctgaagctacgctccgtagccctncaagncnacctactaattgttcaatgactacatgatcnagatatagtgattgctgagcgcagcncagctacaagcttccttcatcattctctcgtgtagaaagacgcgacataattagtctagcatactgantgatgtcatgtctactgcatgcnatatgntgnctaagtatactatntccgtacctactctctatcatgtatgttctcgatctccttgtaacagaccgctcgtactgangaccacacgctacatctccacaacgtacagtaa

SEQ ID NO: 15242 - DNA, 268 bp, Glycine max
  Coding DNA Sequence Number=SeqID_5463
tgggccctccctgggtcgtggaaattgggcccattcatggggtttattgggttggcccttccatgggtggtgccctggcgggttccatttataagccttttttcattgcccgttttcatgttccccttcttggtgataaagaaaattaaccaataggattgccaacttggcctttcatcccttcttaaaaaatgctgcattattgtagttaatttaatctaataataatctttctttttgcgtgttatgcatccttgaaaaggtctat

SEQ ID NO: 15243 - DNA, 319 bp, Glycine max
  Coding DNA Sequence Number=SeqID_5464
tcgatctggagctcacctgtgaggaaccggtgtgcgccgtcgtcaaatcccgtggccaccgccgttcccccgccccctagagttgctcgggagctccacctccgtcgtctacgtcctctacgcgaaccatctcgacctcaactccgccgcaccatcgggatcgagttcttctccgccttcagccaccgccgcatcatcgccggattcttcgccgtcagctcctcttcgaccacccctgcacctcccctagcttgcccccatcatcactaccccgagactgccggcgacccccagttcgactacggtgttgacgacccct

SEQ ID NO: 15244 - DNA, 520 bp, Glycine max
  misc_feature (206)..(206): n is a, c, g, or t
  misc_feature (247)..(247): n is a, c, g, or t
  misc_feature (375)..(375): n is a, c, g, or t
  misc_feature (389)..(389): n is a, c, g, or t
  misc_feature (392)..(392): n is a, c, g, or t
  misc_feature (438)..(438): n is a, c, g, or t
  misc_feature (469)..(469): n is a, c, g, or t
  misc_feature (493)..(493): n is a, c, g, or t
  Coding DNA Sequence Number=SeqID_5465
ttgatttatgctatgttatctgtgttataagagtgtggtgtgtgtgatgtggtggggtagatcagtgtgagtatgtggacgtgtggggtatgggtcgtggtgtgttgtgttgtgagtgtgtgagtagtggtgtttgactagtggtggtatgagagtcgcattggagactgtgatggtgcgtaatagtgggtcgtataataacagtntgatgtatggataattgtatagttagtcggtgcggcgatanacgtctaggcgagagtcagggtgtgttatgagtagcgagtgggtatgagtgtgtgtgtgatgtgagtagatagagaagctgtagtgtcgagatgtagtgagtgagtgagagagtagacagatggaganagagggaactgctntcnccgggcgaagtcacggcgggtgggtgtaatagaccacggtgagttnactatatggaggagcgaggcgcggcccgagnggcgtgcgggtgaggagatgtagncaaggctcttgtgctttcgttctctct

SEQ ID NO: 15245 - DNA, 529 bp, Glycine max
  Coding DNA Sequence Number=SeqID_5466
attcggcaccagtgacgacttcgacttggtttcacactgcaatttctctctctttttctctctgcgcaccacatccccttaacatagtttgaaagagagagagatggctatgaattgcggtggcgttgtggttcggtttggtctgtgagtggtggcactgtgcattgcaggctacgtagtgggtccccctctctactggcacttcattgaacacgtcaaccactcttcttcatcttcttcttgcgctccttgcgtctgcgattgctcttctcaacccatcattacgattccccaaggacttagcaactcttcatttgaaggttggtttctggtttcctgaatgaactccagtgaaatatctctattggtgtactgtacatgagtaaacctttctttattatcataaacttctatatggctgaatttgaaacaaacttgaatgatgatgataggagctcaaataacgtagttaccctcacctaactagtaggctggcttgctttttctccttaggtagggtgaactatca

SEQ ID NO: 15246 - DNA, 362 bp, Glycine max
  Coding DNA Sequence Number=SeqID_5467
tgcctggcctttcacagagggtttgttattcctttcaaagttttttagaaaactcaaccagtcccatggtttttgatggcattctacatttggccaaccagtggatacatctccctagaatggcttatattttgcgtgccctccaacgcggttttggccatcggaatcatccctgtcactgccattgtccacaaagtacttgctagtcacgtcttgatacggagcttgttcacacggcgagtgttcatctgcctcagcataatcactgtcgtcctcgtaggaatcacttccggcgtgagtgcagaatcttgaagccatcttctgtcaaaagtcgtgagtagcgtcaagaatcggttttgcaa

SEQ ID NO: 15247 - DNA, 522 bp, Glycine max
  misc_feature (146)..(146): n is a, c, g, or t
  misc_feature (170)..(170): n is a, c, g, or t
  misc_feature (199)..(199): n is a, c, g, or t
  misc_feature (201)..(201): n is a, c, g, or t
  misc_feature (208)..(208): n is a, c, g, or t
  misc_feature (213)..(213): n is a, c, g, or t
  misc_feature (311)..(311): n is a, c, g, or t
  misc_feature (333)..(333): n is a, c, g, or t
  misc_feature (403)..(403): n is a, c, g, or t
  misc_feature (423)..(423): n is a, c, g, or t
  misc_feature (447)..(447): n is a, c, g, or t
  misc_feature (488)..(488): n is a, c, g, or t
  Coding DNA Sequence Number=SeqID_5468
ggcggcgtccatggtgacgacaccacacgagacagatcgctacagcttcgagcgctccttcatggatcttcgcagtctcttgcacaagaccgtcgctagttcttctgctcgtcgagtgtgacgtgtacgtataggtagagactcgnaggtagcgtcgaggatcgatatcnatgctctaacgagttagttctctctgtanancaaccgnatgtncataggagctgagagacacaatagatgatcatcgctagtcgtgaacagtcgcctacgatgaggtacaacactctgtagctagatcctctatctcctcntcacgtgctgatctatatcgtngtgtgatcgtctactcatgtgggcgtcacaccactacacatcgcacctcgactcttatctcatctcatcntgcgatatgccatcagccgnactaccgacatgactatgtgagtntcgatgtaggagagcagcgcgggagagtaggagggaggagngggagtagagattcagagatatgcgaggttctta

SEQ ID NO: 15248 - DNA, 532 bp, Glycine max
  misc_feature (116)..(116): n is a, c, g, or t
  misc_feature (175)..(175): n is a, c, g, or t
  misc_feature (431)..(431): n is a, c, g, or t
  misc_feature (488)..(488): n is a, c, g, or t
  Coding DNA Sequence Number=SeqID_5469
ttgacgtatcgttcggcatgagccagtgccttgcgccgcttgcgtgtcaccgccactttgtagatcgcgtctgcgattaatcgtctatgcctacggagggatgcgctcctcgtgancgtaactctctcctacgtatgttgtccgcgtgtacacctgagcacatcagaggacctancgactctgttcagaggccactcgcgaattgtatcggaggagccacgcgaccacactctaccccaccgtctgctagtcgcacagcatggcataaaatgccgcgcctcatggtacgttcgtaatgattgacgagtgcagtcaacatcttccgatgtctttacgtggccactactcaatcgctctctacactactcactcactctcataccctcagcgacgcagcttcgaacagcctagtagagacgtgacgctgcccnctgcatcctgctagtcctcacaccacctacagccgagtaacgacatctataacgganatggacactcgtcgttatccgcatatcatgctgctatctgtgtg

SEQ ID NO: 15249 - DNA, 521 bp, Glycine max
  Coding DNA Sequence Number=SeqID_5470
agaggcgcgcgacactattgtaccgcggcgacatatatttggatagtaatgtggttgttactaggtcagtatatatgatatttttattagtgaaatgtaagtgcacatctagtgatgagtgagggagaagtgaggtaaatggggaggtatgtattgtatggagagagtggggtgaggtgatggaataaggggcgtcacaccgtgcgcactgactggtcccacaggacgggagctatagataatcaaggggcagaggcagatcacgaacgcgtctgagtagtgcgttgtttgatagggggttgagtgtggtgtgagcgggcggggagggtttcgttcgatatataggatcactgtcagaccccatagatatacatccatatctagggaagagatctatgcgtattagatgaggagggacgccgcggtgtgtgctaggttaaggcgggggaaggcgtcttatctctcatactgatctgagggcgggcggaccgtgagcaccattgtggtggtgctgtgtcgct

SEQ ID NO: 15250 - DNA, 546 bp, Glycine max
  misc_feature (499)..(499): n is a, c, g, or t
  misc_feature (506)..(507): n is a, c, g, or t
  misc_feature (520)..(520): n is a, c, g, or t
  Coding DNA Sequence Number=SeqID_5471
cttaataatagggtcgcgagctggactagtcgccgatatgtgttgattcggccgtggctgcgtcgtattccgccgtcccgcggccagtctcggcgcctcctacaacagcacccggccacagacgccccacacactcaacccacgcgacactcaacaatagagcaccactaagcggcgaggggatagacgggaagagcggcaagggaaactccattgtcaagacactgggggtgttggctgtgctacgtctctcatatcttgctgaccacagtcaattcccctaattacacgaagagcctagtagcatacactatacattgtaaaagaatacgtacattaattatggaggagttaaaagcagtgaagctatagccagccgaataccaaaacttacagatatctgagcgcaccacgagtttcactctatctctccagcttatttcctagactaggttctgcatgtcatctctaatcattattatataacagtagatgggangcggtgnntattggtctaggnggtgtgtgagtcgtgccgccagtcta

SEQ ID NO: 15251 - DNA, 546 bp, Glycine max
  misc_feature (178)..(178): n is a, c, g, or t
  Coding DNA Sequence Number=SeqID_5472
gatgattgtgtacccattacggcctgcgagggaagtcattcgtagagaaatccaataacacgtagttatatctagggacgatatgagatggacagtccgatacgattgtgtacaagtataaagctcgtgcctgattgcactggcttctagtgcagagggcgtgacgagggctttgtcntgcggtagcgagctataggaacacaacgagtctaggctgaggccgagtgaactctgtccatatgatcagacatggcgctaattggtggcatgtgagatctcacttgattcatatactactcctgcgaatagcgtagcacagatatcgatcatgattatagtggcgagcttgtaacgaagtcagtacctgatctaaccgtagcaacacagaacaatggatacatgaggatgcggagcgggcatatttgttggactagcgtgacagcctatgtacgcacagagaacatatatataatatttatgaggggggacgggagggtgcactaacatacggccgaccgcgggggaggcggcatcaacagtattatc

SEQ ID NO: 15252 - DNA, 548 bp, Glycine max
  misc_feature (92)..(92): n is a, c, g, or t
  misc_feature (108)..(108): n is a, c, g, or t
  misc_feature (120)..(120): n is a, c, g, or t
  misc_feature (134)..(134): n is a, c, g, or t
  misc_feature (220)..(220): n is a, c, g, or t
  misc_feature (343)..(343): n is a, c, g, or t
  misc_feature (346)..(346): n is a, c, g, or t
  misc_feature (403)..(403): n is a, c, g, or t
  misc_feature (405)..(405): n is a, c, g, or t
  Coding DNA Sequence Number=SeqID_5473
aacataggcctacaccgtatacatcacaacacacgtacagtcatattatgcactcaatgtatcgaacgtcgcgagtgtctatatgagcgtgnagacgcgctcgtgctngtgtatatgaantaatatatatggantcgctcacgcgcacatatcatcgatcactcactcgctgcgtgcgctagcgctcatactactgacatgccattgcatagctcgacgncagtcataaccgatagtactttatcatacgcatatatatgtagatcgtgtatgttgaaagagaagacacactgcaggacgcagatcagctcgacacagaatacacattacacacacgtgtatnatntaagaacagagtcacacatcgactcagtagagagtccgcgcgcgtgcgcagatatgncnatacaactgtgtgacttcacgagcatcgctgtgtgagcagacgcagactcgcacgtgatagaatcgcgatacagagtctgatcactctgcgacctcgctctcttcacgccagagcagctacatgcgcgagcacttacagctat

SEQ ID NO: 15253 - DNA, 354 bp, Glycine max
  Coding DNA Sequence Number=SeqID_5474
tatggttatgttccgtcagatcatgttagcatagaaaaaatagttttgttccatctacttatgggctttatggctatctaaaaaggctagtagcatctgtaagtgtatttttagttcctaccttcagtatatttctgtgtaggctatgttcttgaccacatcatcctcgctgttggtttatttgctatagaaaagaaaataacatgtgtgatcaagtcggtacggcattacttgcgagtgtgtttccaaatattccctttctcttacatttctcatgaactctttgagctttatgtagatcacccggtcaacaataccaggtctttatgatgctgctatgcctactttctgtag

SEQ ID NO: 15254 - DNA, 501 bp, Glycine max
  misc_feature (147)..(147): n is a, c, g, or t
  misc_feature (222)..(222): n is a, c, g, or t
  misc_feature (343)..(343): n is a, c, g, or t
  misc_feature (348)..(348): n is a, c, g, or t
  misc_feature (369)..(369): n is a, c, g, or t
  misc_feature (372)..(372): n is a, c, g, or t
  misc_feature (434)..(434): n is a, c, g, or t
  Coding DNA Sequence Number=SeqID_5475
attgactatgcataacctgtctcatatactgagcgtcacctcacttcttctcgatacagaccgtgcgtcgaatatactatcactgagactcgtgcagatgatgatagtatcgatcgtacatacagtgacatcatatacaaccgcccntgcatattaaatattatctgtctaggcgtgtatatgtggctcgctacactattcgatgtcttcaacactactgangcgtgcggtcgtaattatcccgcaccgagtcctctgtcgccgcggcgcctcgaacagtcattgaatctcagaagtatatgatacatgatgtagtcgacggtcgcgagagaatatatacacngagcnacgcgagctgatatattatcnatntatatcgcatgtgattgtcgctaagtagaccgactgtgatggagactgagtgcaacacgcgncgaccgcagttcgaccgtatatgcttatataatatgctcggtactcgtgaccgctcgtttatataac

SEQ ID NO: 15255 - DNA, 506 bp, Glycine max
  Coding DNA Sequence Number=SeqID_5476
gacgttactggtgtcaaggcaaacacatctgctttcattcatccaaatcatcgcttcaacttcaatttcagttcagacaatctcgctcagattactgccttgggtgctggtgttgaggcaagattgactctagctcaaaacggaaatctggtttggcaagtcggctcaaatgatgcatggaaaatcattcgtgcctctagctactacaatactctgatccaactccaaaatgtgagaactggcctgtacttaaaagcagcaagccaaagctgggcgatgactgataaccaatcagactcttcaacttacctcaaagtcttttccattaatgtccttccacccaaaactcagtggaatgaaatgaaccctcttgctctctcccctcctggaacaaagctcgttttagctgctaataacttgattcagcaacaaaatagagccactctcgataaggaatacagtttgacttggaaagccactcatatctatggcgatttcttcaccct

SEQ ID NO: 15256 - DNA, 519 bp, Glycine max
  misc_feature (203)..(203): n is a, c, g, or t
  misc_feature (310)..(310): n is a, c, g, or t
  misc_feature (356)..(356): n is a, c, g, or t
  misc_feature (412)..(412): n is a, c, g, or t
  Coding DNA Sequence Number=SeqID_5477
tgctttcgctgcagttgtgcttcatccgggctcggacctggaatatagatgcgccgcaatcctgatatggcctcgctagcgatacggtgatgcgacagagattcccacttctgaccggagcagaactgtgttagttttacccatcttcctaccgctcgcacggggtcagcggcgcgatgtcgcaatacagtatattctcaagncgggcacgtacggaatcatacgtgtcccaccatgtacatgcctcccagatagggtcgcgtgaccactaggatgagtccaccgtcaacatgttaacgtcactagttanctatgcaccccataagcaatcattagtccttgtgattctagtctgntctccgtcactaatttgaggcgcgtaaacagtatacctctcctctctcattggtangctatattcgcgacacggtctatttctatcatgcaaccttctctgtgtttccggcgcgaagataaaaaaaaagagagaaaacgacgctctgctcgtatcgacaaaaa

SEQ ID NO: 15257 - DNA, 560 bp, Glycine max
  Coding DNA Sequence Number=SeqID_5478
gtcttcgctatttgatatatccacttgtggtgttctgtaaagcgtctctgatcggaagtaggtggagttagaaggattctccaaatcgttgttggagaaggttcagaagagttggcgttcttgtgacggtccagcaaagagtctttctacacctcgatttaagcgtcctcagatataaaatccggtgcatcaaggcctctctgtttgagtactgtcggttaaggtgaaaagcaatcagggagaattcaagttttaaggttaaagcttgaggtagatcaatcatgacaaaagctacgccggcgacaagtaccggcatcggtggtggcgatagaaacgactcctcagtctcccatctgttacggcggcgcgtgcagacacgtctgcagaagctcgagtggaatgtgacctggaaggacgcgtgttaggaagtccttggaagggagacgcgtggccttttacgtgttacacgattaggtttcgagtcaatatattaggcttgacaactatatgggtttaattttaattgagtttgtaataatatgggatttgggcttttacct

SEQ ID NO: 15258 - DNA, 547 bp, Glycine max
  misc_feature (38)..(39): n is a, c, g, or t
  misc_feature (84)..(84): n is a, c, g, or t
  misc_feature (93)..(93): n is a, c, g, or t
  misc_feature (314)..(314): n is a, c, g, or t
  misc_feature (316)..(316): n is a, c, g, or t
  misc_feature (329)..(329): n is a, c, g, or t
  misc_feature (331)..(331): n is a, c, g, or t
  misc_feature (374)..(374): n is a, c, g, or t
  misc_feature (479)..(479): n is a, c, g, or t
  Coding DNA Sequence Number=SeqID_5479
cggtgagatggcgtaagaagactataattatgaaaaanntagatacaaccatacgataatgtataaatgtgcagggtgactctngctgcatcntcgcactcatgccctccgctcctcgcgctctctccttatcatggatgtaaatggatagttatagataatgaatataactgaccgtacaatcgaacaagcgccaagtaggagagacgggcgcgcgctcacgacttcagcgcgatgccgcgcggtgctgccacccgtgtgatcgtcgtgtgcacaagcacaagtatgacgcaggcagacacagagagagagtncnaatcctacgacangnggtgaatgtattgttgtcgccccatcgcgctcgcgcgcggacnagcagagagactaagagagagagacagagcaccgtatccccgccctggctacgccgtgtgctgtgggagctctctctgatattgcttcgtgtaggtcgagcgacncacctcactcccctcctgatgagagaggcggcgacgaggacgtatgacttgtgttggcgctacgaggc

SEQ ID NO: 15259 - DNA, 334 bp, Glycine max
  misc_feature (45)..(45): n is a, c, g, or t
  misc_feature (71)..(71): n is a, c, g, or t
  misc_feature (239)..(239): n is a, c, g, or t
  misc_feature (266)..(266): n is a, c, g, or t
  misc_feature (306)..(306): n is a, c, g, or t
  Coding DNA Sequence Number=SeqID_5480
tttttgaacaacacgctttgcagttggatatatctacaccataanaagcctgtctaatacaatgaactacnccaatagttcctttctttttccctatgtctccttgatctgaaggaactatgatgcttatccccattctcgttctccgccatctcccatttcttctggaattcctcatacacctagtatggaatgccgtcgtattcaccgtaacccagcgccaagttcatgttctgcanacactgtgtagcagcgcccttgagcanattatcaatagtagcattgacaacgacgcgcttgccgganctgtggacggcgaaaccaccaatctcaa

SEQ ID NO: 15260 - DNA, 279 bp, Glycine max
  misc_feature (237)..(239): n is a, c, g, or t
  Coding DNA Sequence Number=SeqID_5481
atgcaggataggcttaacgattacaagagaagctctctcgactttagcgaatctggatctggcgaaaaagattacagatcaagaggttactcaaaagaaagcagcgtcgaagatccatatagtccagaaggcaaagcctattcacctgacgtccattctcttgaaggatctttaaaaccaactccaaaatcaactctcagagaagtgaatacattagcctcaaaaggaaagaagaannntatcatcctgaaagattgaacgaaacacacagaatagctc

SEQ ID NO: 15261 - DNA, 600 bp, Glycine max
  misc_feature (37)..(37): n is a, c, g, or t
  misc_feature (255)..(255): n is a, c, g, or t
  misc_feature (410)..(410): n is a, c, g, or t
  Coding DNA Sequence Number=SeqID_5482
tcatgtaagtcacgtgccacacctacaacccgcgaancctacaaaaacgaaagcaaaataacatccaaaacaactcactccttggttatgtgcaaatagtgtagggacatgcgtgtcaagataaatatatatattttgtgttatttgatgtcattatttcgcccacatctacgtgtctaagtctgatggttgttacttattatgtagcgttgtgctatgctgtctaaacagcgaccgcctcaccaccgcacagangagagatgtccatctgattgtcgttatatatatatatacatgataacaacaatctctattatgttcgtcttatctctatgtcgtacattctcctatacgctccttacatttcctactcttctacacttacctaactgtgcgagttcgacggagcnacgctgcattggggtgtgcggggcgctctatctatcttatcatcttatcggtcttgttaactgactatataactgtaatcataacatcacgtagatatcaccgatctgacaacacgcacactgatagcacgctttgctgctcctcccttctattcctctgcgtctagttcgttcacattctgaccacata

SEQ ID NO: 15262 - DNA, 483 bp, Glycine max
  misc_feature (42)..(42): n is a, c, g, or t
  misc_feature (51)..(51): n is a, c, g, or t
  misc_feature (63)..(63): n is a, c, g, or t
  misc_feature (108)..(108): n is a, c, g, or t
  misc_feature (149)..(149): n is a, c, g, or t
  misc_feature (166)..(166): n is a, c, g, or t
  misc_feature (182)..(182): n is a, c, g, or t
  misc_feature (217)..(217): n is a, c, g, or t
  misc_feature (225)..(225): n is a, c, g, or t
  misc_feature (227)..(227): n is a, c, g, or t
  misc_feature (232)..(232): n is a, c, g, or t
  misc_feature (237)..(237): n is a, c, g, or t
  misc_feature (253)..(253): n is a, c, g, or t
  misc_feature (255)..(256): n is a, c, g, or t
  misc_feature (272)..(272): n is a, c, g, or t
  misc_feature (280)..(280): n is a, c, g, or t
  misc_feature (290)..(290): n is a, c, g, or t
  misc_feature (301)..(301): n is a, c, g, or t
  misc_feature (313)..(313): n is a, c, g, or t
  misc_feature (324)..(324): n is a, c, g, or t
  misc_feature (329)..(329): n is a, c, g, or t
  misc_feature (348)..(348): n is a, c, g, or t
  misc_feature (377)..(377): n is a, c, g, or t
  misc_feature (388)..(388): n is a, c, g, or t
  misc_feature (392)..(392): n is a, c, g, or t
  misc_feature (401)..(401): n is a, c, g, or t
  misc_feature (404)..(404): n is a, c, g, or t
  misc_feature (410)..(410): n is a, c, g, or t
  misc_feature (412)..(412): n is a, c, g, or t
  misc_feature (415)..(416): n is a, c, g, or t
  misc_feature (418)..(418): n is a, c, g, or t
  misc_feature (425)..(425): n is a, c, g, or t
  misc_feature (456)..(456): n is a, c, g, or t
  misc_feature (458)..(458): n is a, c, g, or t
  Coding DNA Sequence Number=SeqID_5483
aacagtgctcacacaaagatcagactcaccgtagcagaccgntcgcgctcntcccgtccactnctacagcacatctacgcacggacacactgccgtcctcaccatccngcgctcacgcgcactacgacgccgcacgtcacgaacgatantataccacatgaactantaacgtgactgcatgntcagcgcgcatgtacgtctgagcgtatgcggacgntgatgcgnantgganacacngatactgcccgcacancnnctccacacatcacccnacccacgntgggcggcgncgacacattgncaccgatgtcantcgcgacttanaccanaccattactagatacaatnctgcccatctcgtacacgaccgtcccatncatcactcctncatntatacaacnacncaacanancgnncnacacgcncacactagcacagacgcatgctgacgaccgntnacttgactctcttgtaccatcgctg

SEQ ID NO: 15263 - DNA, 563 bp, Glycine max
  misc_feature (191)..(191): n is a, c, g, or t
  misc_feature (527)..(527): n is a, c, g, or t
  Coding DNA Sequence Number=SeqID_5484
ctcgcgctcgacactatatatacaacaaacaaatatcgtgggtgcgaacagcatcatcatatatcgctggcgtactattatacctactctattatatgatgaatactataatacattgtggcgcgcggagagacgaaactcgcttcgcgctcacctctctcactctcctactacatcttacctctcgatcntgatgttccgcttgtgtgggtggctgtatatacaacatatctctcactgtataatacttctaatctttcaacaactatattaacattcacacatctcacttctctctcgcgacatcttcgaccggggtgaagacactcactcactcggtgccgcgctcatacagcgcccgcaccactccctctctgcgctccttcacattctcctccgcactctcccgtgctccctctctcgacacttctcataacatatcaagtgctgttggcgcgacagacactatcgattcactactcactatggcgacacataataccatacaacaacacaccctcgctctncgccctctgccttgtattcctgtctctcgcatacgt

SEQ ID NO: 15264 - DNA, 192 bp, Glycine max
  Coding DNA Sequence Number=SeqID_5485
tctctctgaacctctgttccaatcctccaaccatgtggcgaaccataagactattcgaagagcgggcaactaagcagcaaacaaacccgcaggagctagggtacgactccgaactttcgtccccgactcggtaaaaatccttcgtgggtccacctctaccgccaacattccgcggagaagaacgtgtacgag

SEQ ID NO: 15265 - DNA, 581 bp, Glycine max
  misc_feature (220)..(220): n is a, c, g, or t
  misc_feature (266)..(266): n is a, c, g, or t
  misc_feature (282)..(282): n is a, c, g, or t
  misc_feature (337)..(337): n is a, c, g, or t
  misc_feature (411)..(411): n is a, c, g, or t
  misc_feature (438)..(438): n is a, c, g, or t
  misc_feature (520)..(520): n is a, c, g, or t
  Coding DNA Sequence Number=SeqID_5486
gaggaagtcacgtcattggccacagtgtctcaattgtcgatccaacggctaaacacttgcgatacagcttacatagtcagtcgtgtctctcatgctcaagagcaatacgataatgggttgtctgttcttgcgatcgtgcttactccacttcatgacagactcaatatatatgatactcatccggagacacatgagaggtggacgtattattgactccacnctcactctatagtagcgataccatgaacaatagtattcacgatgtngtcatcgtgctatgtncaaaacttgctatactatatgtaacaacagtaagatccacattcatatatcacantgcactactcgtttatctcgtactcgtctaaacgacaaccatacgattgctacacatcgtctcgtgagtagagntgttatgtatgtgcgtactatatcatncatcgctcaatctatgcgctacctcactgctgtcattcggcctcttccctctcactcatacatccgtcacatgatgcgcttnatttgtcgtttcatactatggccgatggtcctgctaatagctggcataacatgcgtcgcat

SEQ ID NO: 15266 - DNA, 506 bp, Glycine max
  misc_feature (93)..(93): n is a, c, g, or t
  misc_feature (419)..(419): n is a, c, g, or t
  Coding DNA Sequence Number=SeqID_5487
aggcgtggactgtacacatgcatcagtctgatcaattaacgaagctaattccatcgcattactccttcacgttcgcgcgtcattaacaaaagncgaacgccactcattagtgcattgcacgcgccgcctccactggtgtccgtatcgcgttactgcagtatcgataaaacaggagatcacaccagtcatggcgagactaacgtatatccatcagagaccataaagtgacatgtcgccatatggagtcatagtgcgcgtgtcggttcgactctgctcgcagcagtgctcatagttatttatatgtctgttgctcttctgtacgtctatgtaatctcgcgtgctgtatgcgtagatgagatatcaggtgcgatccggcgatacagatatatagatagacatacgagacatagagagatctngtcgctcacgcatacgctgcagtaactcatctctatcagaagtgcgctcgagtatacactcctgttgccatacactgcggatcgtag

SEQ ID NO: 15267 - DNA, 365 bp, Glycine max
  Coding DNA Sequence Number=SeqID_5488
ttcaaggttttgaactctgggccctgatcgcattatgtgaacctcctttgggggtatttcccccggagagttttcctttatgcccttttttttttttcgatggagcaaccatagggtgccttggccatttcagggggcaggaattggaattttcacttttagtagccttcagaacaagaaaattgcttccctgttaggccactgaatccttgatgcagcagattcagcaggcaaagatcggattgaagagaaggcttcaagctcaccccctttgaaatgaaacatttagagattcaaccccaaagggggagagaaagaagttgtaggacactggggcatggaccgagaaagaggccatttcgcaa

SEQ ID NO: 15268 - DNA, 543 bp, Glycine max
  misc_feature (381)..(381): n is a, c, g, or t
  misc_feature (383)..(383): n is a, c, g, or t
  misc_feature (436)..(436): n is a, c, g, or t
  misc_feature (441)..(441): n is a, c, g, or t
  misc_feature (448)..(448): n is a, c, g, or t
  misc_feature (454)..(454): n is a, c, g, or t
  misc_feature (493)..(493): n is a, c, g, or t
  misc_feature (502)..(502): n is a, c, g, or t
  misc_feature (513)..(513): n is a, c, g, or t
  misc_feature (517)..(517): n is a, c, g, or t
  Coding DNA Sequence Number=SeqID_5489
gaatgagacctgaccacgcactgagcgcatagagacagctcatatgtatgccgacgtcttcgtcatgctgctaggctgatgtaatctccgccctccccttccgtctcatgtactcagtcgatcgctgcatcatgctacgtcgactatctgctccacgcttgctacaatgcgagtgacacggcactacacgcctctacgtcgcatacctcatcgtatgcagcgccttatcagcatgaaagtgatatggcgactcacgcgcggatgcgtcggctctacagctctaacgatcgtgctcgctccacagcgcatctctgcactgtgaatatgacgtcctacgacgtcggagcactgccacgtacgcatcgcgctcgctgctgtgtncngtaagccgcgtctgactgcgcgacctctccgcgctcactaagccagacactcncgtanactctcngtctantaacgagaacatcatacgctgcgacgacgccgatactcncgtgtggcncgtatcgcagngcgncaccaatacgcatgtcgacgatgtac

SEQ ID NO: 15269 - DNA, 579 bp, Glycine max
  Coding DNA Sequence Number=SeqID_5490
tagcgagttgctttccgatctaaaagaaagatatgaagatctgaagcaagctgcaaaacaaaagtatcactactggaccgatagggctgaagacataaaagaagaagataaatctaaagcactcactatttataatgaggctcgaggaagatactatgagagcaaggagagactaaaagctgaatttgactaccttaatggcaagctcacagaagcggagtacaatgctaaggttatccttaaaagagaagatgaccgtagaagaaatgtctttggaagagcagcagatgctgttaagcacggttatgaaaacataaaacacaacatccaaactggaacagaggaaaccgtgagaagatacgaagaggcagcaagaacagctcaaattgaaagagaaaagcttaaagatgttgtaagagaagattatgaagcgctaaaacacaagatcaaggaaggagtccatggaagtcatgaaaccaacgatggtgagctctaatggcaaaacttcagctatgattgcaattagtgtttgttaagtatcaatttatataattggcttcattctattgaccaacatgt

SEQ ID NO: 15270 - DNA, 505 bp, Glycine max
  misc_feature (407)..(407): n is a, c, g, or t
  misc_feature (447)..(447): n is a, c, g, or t
  misc_feature (477)..(477): n is a, c, g, or t
  Coding DNA Sequence Number=SeqID_5491
attaataatgaggtgctgcgtgctgtggaccgtcccgtctccgattattaaaacggctgcctattctgcgtgtcgtcgcgtacatttcctaaatatatacatacggcgccgtcgaacatatacacgcggggtggagcgcgaataatagagttgttgataaatgcgtgtcatctcgcgcgccgtcgccagatattataaacaaacaatagagcgttgcgtgaagaatgttatttgtggtctggttcttcctcgtccgcgataataaaaatatagcgtcgactatagtggctgcgcaatatgtggcacagtgaggcacacactgtgaggtggctctccgctctcactacgcggtaatatatatcactcgctctcgcgaatagatgcacccgcgccgccgcgcgatagantaattctatctatattgcacggcgcgggtcgacgcgcgcngttaaaaggcgaattaatatatgcagctgntgcgcgctcatcgctgacggattataac

SEQ ID NO: 15271 - DNA, 405 bp, Glycine max
  Coding DNA Sequence Number=SeqID_5492
tcaagtactgaaccgatattaaaaaggagtctctgatattccatctggagaaatatgatcactctcattttaaagatcaatggggaaaaaattgtagtatagtcatttttatcattttatgttttattagccagtaacttggtattctgttttgatgctccaaaaccaggtggaacctgacagcaagtggaccaagaccaaaccctcagggatcataccactatggattgatcaagccgagtcgaaccatcgtgcttgcaaattgtgctcgttatatcaatggcgagcggaggtatgcggtcagcggtgtctgatactatgaaccagatgccgcattgagacttgccgactacgtgaagcaggctggagtgatctacattagaagcattcgtacctagtggtgcg

SEQ ID NO: 15272 - DNA, 488 bp, Glycine max
  Coding DNA Sequence Number=SeqID_5493
ggaacttgggatacataacatttgccatctcattaaggagttcatttgagttataattctccatcaagcagcacacctcggataacgagcaacatcttgagaaaaagatgagctgtggggtgcctatccacccagaatgctttggtttcggtcactaaactcttgtagaaaaccatgaagagcttctgcccccccccccccctcttcactgttttttttcctggcgtgtgcaccccccccatatctgttccgaccagccttcaaaatcccggctttccaatagcataccctaggctcgcatccccacccatgtcgatatctctcgaactctccccccgggggggcacttattaaccccgcacactcaaacattaaacctctcaaagaatctccccgcccccccttggccattctattccttacccacccctctcttctctagcctccccaaaaaaccttaaaaaaaatgtcactctttgcacaaccgc

SEQ ID NO: 15273 - DNA, 398 bp, Glycine max
  Coding DNA Sequence Number=SeqID_5494
caaggagaatcgagacccgccgacataagttcccgacttcgtcgaccaccttctacaattcctagtcaccgacatctaccgagtgggggctgggggccagtccttccactttctcccccatccatcccccggtaagatccccaccgctgaggcccacgcgccctccaacgaggaagatggcctgtcgatctcattcgaggccatagccctggcaacaaaaattcctggacgtgggcctgcggcgtggggcgggtcctcatgctgggccatcgtcggcccacttcccgcgccgaacgtgggtgggcatcacccatcaacgagtacccagtcaattcaagcaatgatgcacaacaagaaggctgggttggactctctctgcgaggtcatgtgttggaatc

SEQ ID NO: 15274 - DNA, 590 bp, Glycine max
  Coding DNA Sequence Number=SeqID_5495
gtttaactcgcagcagcaaaatcatatacttcaacaacaacatgagaatggcaagcttattaccatgggatctcaattttattttatgtccctgattaggagccttgccatcgataggtcatgcattaatgacatttgtttatcgaattcttaaacacgattggtggacatgattttttgtttatctttagtccgtgcgattgtatcacattaaaattaatataatatcattttattcatacagattcttcctgctctggtatctaaattgatggttttattagaatcttaatatttatctgtttttatctcttccttttgtactgtatttacagaattgatcataatttacaattctgctctcggcatttccaatatggaataattcattaagaaagaacgaaaaagagctttagcttttgtatttagtgtagaaattaaaattaccaccaagcatttggattgaaaatagttatatgctaatgaaaatgtcaatgaacagagtacaaatgcaagctagctagcttgcctgcgtgtggccatcatgaacatattctgatggatgatgacacggtaaattcccatagccc

SEQ ID NO: 15275 - DNA, 581 bp, Glycine max
  misc_feature (35)..(35): n is a, c, g, or t
  misc_feature (37)..(37): n is a, c, g, or t
  misc_feature (67)..(67): n is a, c, g, or t
  misc_feature (85)..(85): n is a, c, g, or t
  misc_feature (91)..(92): n is a, c, g, or t
  misc_feature (170)..(170): n is a, c, g, or t
  misc_feature (217)..(217): n is a, c, g, or t
  misc_feature (251)..(251): n is a, c, g, or t
  misc_feature (278)..(278): n is a, c, g, or t
  misc_feature (283)..(283): n is a, c, g, or t
  misc_feature (311)..(311): n is a, c, g, or t
  misc_feature (327)..(327): n is a, c, g, or t
  misc_feature (344)..(344): n is a, c, g, or t
  misc_feature (352)..(352): n is a, c, g, or t
  misc_feature (404)..(404): n is a, c, g, or t
  misc_feature (413)..(413): n is a, c, g, or t
  misc_feature (415)..(415): n is a, c, g, or t
  misc_feature (420)..(420): n is a, c, g, or t
  misc_feature (428)..(428): n is a, c, g, or t
  misc_feature (443)..(443): n is a, c, g, or t
  misc_feature (476)..(476): n is a, c, g, or t
  misc_feature (521)..(521): n is a, c, g, or t
  misc_feature (524)..(524): n is a, c, g, or t
  misc_feature (553)..(554): n is a, c, g, or t
  Coding DNA Sequence Number=SeqID_5496
ctgctgtcgtatgactaacatcgttattatcaatncnaatactcagcataataatacatcacatcancgtagatataatgttagntgacannagcagtaccatacactgtcacacgagactatacacactcgttgaactgtatcgacgaacacgatacatacacagctgntcacgcgtcgatacatcaccttcgcgccacgcgctgctctgtcgtgntgctcatctcgctaccgacgcacagctttgtctnccgacgttctactgtgagatattcatngatgncagcgatgcttagtatgattatgtgttngtagtagcatctctgngcgacgcatgaactacnctcgagantagaactcatgaatatatgatatgattaacgtgatactagagcatgcactantacgacatnancggancgacagtntactatatgaccgtnagctatacttaaataagcgtcgcgatcacatantctacgtaacgtctctcgacgtcagcgaggccgtccgtggatgtngtngtacatctagtcatcgcgtctggtcgacnntcgcactttacatcgacgcgtctagtc

SEQ ID NO: 15276 - DNA, 482 bp, Glycine max
  Coding DNA Sequence Number=SeqID_5497
aaatgtgaatgagtgttgctccatgggttatccggtatggggcatcaacttccttttcggtccagaatggacaaaaaaaaaaagaaaagtgttttttagaaagccccatgaacagctttctgttccaaaacgtagccatgttcaagttaaattaatcccaacaacaaaaacatttttgtttcaaaacccattagcaacatcaacccctatcaacacttcgcaacaaaaaaaaagtacacaaatccatgggaaacaaggtacaatggaaattcacccagaaaatcgaaattcaaaacgacccaaatgataattagtgaaggaaccgaatggaagtggaaaaaaaacaaatatctagatgggaaataaaggcgagaaatacctgaaacggaggaaggggaagagagatgggaaggagaagagaggaaggagcaatggaggagcggagagcgagcgctggagcaagtgcgggtaaggttcaaaga

SEQ ID NO: 15277 - DNA, 404 bp, Glycine max
  misc_feature (129)..(129): n is a, c, g, or t
  misc_feature (351)..(351): n is a, c, g, or t
  misc_feature (359)..(359): n is a, c, g, or t
  Coding DNA Sequence Number=SeqID_5498
tagtgccgcaggtagtgaacaggctgtgcccagcgaaaaccagacgatactctataactgacgcatcctcctgtcccctcgtcaacaacacataacagaagaggaggggagagggagagatatgagagngcggatgtgcgtgcgggctgcgtgcgcgggccgccgcaccgtattcgacctggtgccctccgcggacaggtcgcccggaccatgtaccgcgcattggcgcgagccctgcaccgtaattacaatgcagcatacaataccggggagcagtagcgcgataggcgcagaaaggcggtggaatcagcggagcagatcagcgacgcagagacgtgcacactcatagancgcagganctacaatatatttatatcacctatcaccgagtcttcattcaattc

SEQ ID NO: 15278 - DNA, 589 bp, Glycine max
  misc_feature (365)..(365): n is a, c, g, or t
  misc_feature (433)..(434): n is a, c, g, or t
  misc_feature (516)..(518): n is a, c, g, or t
  misc_feature (521)..(521): n is a, c, g, or t
  misc_feature (523)..(523): n is a, c, g, or t
  Coding DNA Sequence Number=SeqID_5499
gcgagagcgatctaaggtcggaactaagaggcaagcagctccagagttcatccccatctgcagcggccggcatattatcttgtcgatgctattgtgaagagggtgatataagggtcaatcagggcgtgagggtcacatctctcatttccactctcactacatacaacagagttatagatgagcatgtgtggtcaatttactatactgtatccatcgtagagagctacctctctgcatactattcatggtctcgatacgccttaaaaggtggattatgtatggctagcatcacctccgcatgacccggcgcatggtctctcgaccgcgagcgcgaggtcgggcgctctttctctctattatccagnatcatgtcaattaagggtagaaaagagtactgtatgcgagaccttctcactcacacagccgcgggggnngattctcatttattctataatgcagtgcggcctcgccgctccctcactgtaggtatgttgccgcgcgttctctctccctccnnnttnanccccgtcggcccctacccactccccacttcgagcgcgctactttcatctcgcactcctttaataat

SEQ ID NO: 15279 - DNA, 575 bp, Glycine max
  misc_feature (86)..(86): n is a, c, g, or t
  misc_feature (121)..(121): n is a, c, g, or t
  misc_feature (123)..(123): n is a, c, g, or t
  misc_feature (201)..(201): n is a, c, g, or t
  misc_feature (296)..(296): n is a, c, g, or t
  misc_feature (319)..(320): n is a, c, g, or t
  misc_feature (357)..(357): n is a, c, g, or t
  misc_feature (382)..(382): n is a, c, g, or t
  misc_feature (385)..(385): n is a, c, g, or t
  misc_feature (468)..(468): n is a, c, g, or t
  misc_feature (487)..(487): n is a, c, g, or t
  misc_feature (491)..(491): n is a, c, g, or t
  misc_feature (522)..(522): n is a, c, g, or t
  misc_feature (525)..(525): n is a, c, g, or t
  misc_feature (538)..(538): n is a, c, g, or t
  misc_feature (545)..(545): n is a, c, g, or t
  misc_feature (547)..(547): n is a, c, g, or t
  Coding DNA Sequence Number=SeqID_5500
aaagaagtatggtagagcgtagagctttggataataatcatacaagatataaacaagataagtgggagaggagagatgtatgggtngtatttgtaggtcttggcttgttcggtgacgagcntnccgtgtgatgaccagaagaaagaataaagcaggaaaaagaacagaaaacagtacatataagcgtacatatacaaaatnaagagcaagcataacatgttcacgcagagagcagagcgcagtgagatgagacagtataatatggttctctcgtctgtttgttctgttcttatatntcttattatatgaagatatagannaattatgttatcattattttattaatattaagatatnaagatagtagaaatgagagaatagnatnacgacgtattctcccggctgatagtatcttagagacatgaatagataggaggagtgttaagtggactggtggagatacggagnttagagcagagcttctctngtcntagacacaacgaagttggtaataataagagnatngtgaggagtgagnagaggtntntatgttgaaggcgcagcagcgtgcggct

SEQ ID NO: 15280 - DNA, 446 bp, Glycine max
  Coding DNA Sequence Number=SeqID_5501
taagcacagcggattctgcgcctctagtcaaactggattagaaataggagggaggctaccctactggcatttgtgacacatgagtccaaatccagaccatgctttgaactgtgtgaaagaaaatggacagccatttcttcctgatacacgcattcgtggaatcgctgtatgcaatgaatttttgggtggtggtgactattatttgtggggagaactactcggcgctggtgctaatatgtacaatgctgccgcgagacttcatctatatcaactggatcaaatgtctactgctaactcgtttgcagtttcttcacatgcctacccttcctcctgtggtcaatatgatgataatgtgaaactgtttatgaagccgctactggagcttttccagcatattggctctccattctgtgataatgcgtacccttttctattccatgcgagag

SEQ ID NO: 15281 - DNA, 458 bp, Glycine max
  misc_feature (47)..(47): n is a, c, g, or t
  misc_feature (51)..(51): n is a, c, g, or t
  misc_feature (302)..(302): n is a, c, g, or t
  Coding DNA Sequence Number=SeqID_5502
atagacagcgtgctgtgtcacacctctctcggagacgtgaagcatantcgngtaaagaaatcactccgattatgtgtctcgctgtttctcccacttcttataataacgagtgcttgcaacgctacctgcaatgataaaatactgcgccgtcaggcgtgtattaacagaaacgagactacggttgtgcatctcttcttctgactacattcccattctacagtctagtcttcggagaacacgctgtgtctatctctctctgtctctctctcaacacgacacatcacagcatctacccacacgcntctctcctgttagttagcgaacactcacaactcctcgtctgtcgccctacataacttgatgtggtgacagccctcctctctacccccagcaatactatcctcatatcgccctacgcctatcgcacgtagagagtcacacctcacatcttcttatag

SEQ ID NO: 15282 - DNA, 533 bp, Glycine max
  Coding DNA Sequence Number=SeqID_5503
gagcaattggttcacgtcctacgttacctcgatcatatgtgcagacggctcaatcctacagaaactctgcaccaacacccttttcctcattgctggcttcgactcagaggagcttgacactgaaaagcttccggatatcatgatgaatgttcctgctggttcctctaccaagcaacttcttcacttcggacagctgattaacagtgacaaattccgtcagtatgaccttggctatttcaaaaacctgtggaactacggcagcatcaacccgccagagtacccgcttgacaaaatcacaacgcgcgtgtacctgcactacgccgataacgacttgctcgcaactcccaagggtgtggagaggttgagcaagggcctgaccaacgtcaagatgctccggaaagtgccctttgagaagttcaaccacctcgacttcctttacgcccgtgatccgaggcagctgctctacgaccaggtcatggagagcgtcgggcaggtgctggcagaggaagcagcccgagcagcgtaacgttgaa

SEQ ID NO: 15283 - DNA, 586 bp, Glycine max
  Coding DNA Sequence Number=SeqID_5504
acatttcgagcatgtctgggcgaggaaagggaggaaagggactgggaaagggaggagccaagaggcacaggaaggtcctccgagacaacatccaggggatcactaagccggcgattcgtcgtttagcgaggagaggcggtgtgaagcgtatcagcggtttgatctacgaggagactcgcggcgttctcaagatctttctagagaatgtgattcgtgacgctgttacttacactgagcacgctaggaggaagaccgtgacggcgatggatgttgtgtatgctttgaagaggcagggaaggactctgtacgggttcggcggctgaggggattcaattaggggtttttaaatcgcgtttgtgtttttacggtttggttctatttgggagtttaacaactctctaagttgtctttatctgaatgttttaaaaaagctttatctgaacttgtccgtctcttagaaattattgaggcatttagaaggtgggaaggagtatgagcttctgataatcgaatatcgacaagtaatagttgttgtgagctgggacgggtagagatttcgatactggtcatttaacgatgttgtgaa

SEQ ID NO: 15284 - DNA, 529 bp, Glycine max
  misc_feature (53)..(53): n is a, c, g, or t
  misc_feature (99)..(99): n is a, c, g, or t
  misc_feature (220)..(220): n is a, c, g, or t
  misc_feature (262)..(262): n is a, c, g, or t
  misc_feature (489)..(489): n is a, c, g, or t
  Coding DNA Sequence Number=SeqID_5505
gcacttgtctgcatcagcgtcttacgccagatgatgtgacacatgtactcacngctcaatctgctgatacggcaggctcacgcacactctcttcaacanatcacagaaattacctatgagtcacatcactaaacaggcacatggcacgacctgtctactacatgcagactacatcgccgtatcgcatagtagtgtctatacacaatttagacatcttatnagatggatgttaaggctagtttactcgtcgcgtgatactcangcagcagtagatagtcagttccatagcacaggccaggctagctatcgcatctaggcgcaatatacccaactctaacatgtagatgcttcagacagatctctctcagaaggatgaagacccaccatccacgttgaaatatgtctcctacaccattgtgacagcgcatcctctcggattttggggggggtgtgtggggcacatcacgctccatcacaggactggcgatnggggcggtgcctccctcttatctccattttccgtttgctc

SEQ ID NO: 15285 - DNA, 514 bp, Glycine max
  misc_feature (27)..(27): n is a, c, g, or t
  misc_feature (342)..(342): n is a, c, g, or t
  misc_feature (359)..(359): n is a, c, g, or t
  misc_feature (371)..(374): n is a, c, g, or t
  misc_feature (376)..(380): n is a, c, g, or t
  misc_feature (385)..(385): n is a, c, g, or t
  misc_feature (392)..(393): n is a, c, g, or t
  misc_feature (418)..(419): n is a, c, g, or t
  misc_feature (424)..(424): n is a, c, g, or t
  misc_feature (426)..(426): n is a, c, g, or t
  misc_feature (431)..(432): n is a, c, g, or t
  misc_feature (437)..(439): n is a, c, g, or t
  misc_feature (451)..(451): n is a, c, g, or t
  misc_feature (454)..(456): n is a, c, g, or t
  misc_feature (460)..(460): n is a, c, g, or t
  misc_feature (463)..(464): n is a, c, g, or t
  Coding DNA Sequence Number=SeqID_5506
gagccggagactacaataaatgcgcgncatagcattataagcccatcatcctctatcttcgctcatcactccgctcctagacgatctcaggctcccctcgcacgtctctacatgtacgctacgcgtatccgtgagcgcgcgcacttatcacgacgcggactgtgagtcgcacgcatcatcgtacgctcataccaacccccagcagtcccgtctgaatgttacacgcagcgccgcgatacagcgcacacgacgcccgcatgtcacacgctaattgtatctcccaagatccgcgcgcaatataagaagctgagcatactcacgatatatgtagttcgtttgtcntgccgcgcgcgtgtacnactccatcgtannnntnnnnntaaanaagatannataagagagggcggtggggggcggnntaagngngcatnnagaannnagtatcagatanatnnngaanaanngtaggttcgtcgattgagatgtagtatgtacgtgcggtgtcgtcgcgctc

SEQ ID NO: 15286 - DNA, 448 bp, Glycine max
  Coding DNA Sequence Number=SeqID_5507
acacaacattgttactagccccgtacaacattacaaccgatcaacaccacatcatcacgcacgttaaactcgccaacaaaccacaaaaccagtacggagcagtctggtacaacaagcaaaggaaggctcgtttgtgggtctggccttctgggagacatggcagctcagctagctcgtcggtttagcgagcggcctgcacatcggggaaacgctgctgggagcaccagtcctcgcagctctgcctttgagccttgcattcctcggcgcagaaacgccacggcctggcagcgcactcgctgtcgcagccatcgccttcctgcctgcatgtgctatagcaggcctccctctgccccgccgtggccaggacgagcagcgcgcacagggcggccgccatgacagcgaccttgctagcagtggccatttggtcgaggatgataacttctgtgta

SEQ ID NO: 15287 - DNA, 290 bp, Glycine max
  Coding DNA Sequence Number=SeqID_5508
aagctggcacgcctgtaggtaccgcgcctctattccctggttgagcggggcgtgcgctcaccaccagctaaatcaccagctgaagaagactggaaggataaaccagaatatctgctggaaaaacgggtaagaagtgtggatgcaaaggaagctttccgtcttcagaaagaaaataattttgtcattctagacgtactgtcataagcagagtggaaagacgctcatcctccagatgctatcaatgtgcaaatatatagggcttagtgaagattggacaccatgggacattg

SEQ ID NO: 15288 - DNA, 314 bp, Glycine max
  Coding DNA Sequence Number=SeqID_5509
gagcattggcaaaaaggcatcaaatgcttactaaaacttccccataccaaagccagatacattcttatggcttgatggttccaaaactactggtccaaagaggaaattggtgctttttttggacaaaaaaaccatttcaaaagcggggaaaaaaaatttggaaagcttattcccatattggaccaaaaatcccaaccctttttggggatttggccccaaggccttggaaaaaaccccaaaaaaaatttggcttcccaaaaaagggggggtcccaacccaggtgtgaaaaaaaaattgcgtatatcgggcggaag

SEQ ID NO: 15289 - DNA, 369 bp, Glycine max
  Coding DNA Sequence Number=SeqID_5510
gagtgtactactctgttatctccacacactaattaaatagatgtgtggtaggtggggaggaagaagcgggatcttcgcacaccccccgtaggcttgtgtcttatttgtacgcgaggacagtttacaatactacttcttttcagtcacccaaatactctacactctctctctacaagcaatatatctgtgacgggtaggcgactgtataactgatcggcatgctgtctcgctagagacattactggatagatgatagatctagctcgtctaccatcggtagacagaatgccatactcgttaatatatacactacttctaacgatgactattacagtcacatgctataaactcttgatgtcttctacttag

SEQ ID NO: 15290 - DNA, 391 bp, Glycine max
  misc_feature (79)..(79): n is a, c, g, or t
  misc_feature (114)..(114): n is a, c, g, or t
  misc_feature (238)..(238): n is a, c, g, or t
  misc_feature (275)..(275): n is a, c, g, or t
  misc_feature (279)..(279): n is a, c, g, or t
  misc_feature (292)..(293): n is a, c, g, or t
  misc_feature (344)..(344): n is a, c, g, or t
  Coding DNA Sequence Number=SeqID_5511
taacatgtgggtgctgattgtgtgtgaatataatatatatgtatattatactgtgcatcgtgttgtacggctcttatanatacaaactattatatgtgtcctgctccagtctantcattatctccatacactcatgcatattaactaatatcggtgcacctgcggacgagcatatgaagataacacatgtacatctctctgcggcagtactcgtctctatactcacacggcatgtgangcacatcaacatacgtgcgccgtacgcaatgtagacnaganagatcttcatacnnacacacgcgctacagtgtcttcgctctgtgacgcgatataatctacgttanactacatgctcactcggtgagtatctctatctgtggtatatctgtga

SEQ ID NO: 15291 - DNA, 448 bp, Glycine max
  misc_feature (408)..(408): n is a, c, g, or t
  Coding DNA Sequence Number=SeqID_5512
agctctaagcttcatctatctccgtctttcaggcaaactaaaaaggttataatctagttttctgtcctcctctatctagaatggcgcttgtcaaaagtattgtttcaacagtaagacccaacttaatgacatttctgaagtttgcaaaagttgaattaactccacctactcctggtgacattccagcaatttcccgtgggtttggagacatcgttagtgcagccaagactggtcggtggaagcaactgactgttaaagaagcatggctggaatggtttggtgttcactgaagtaacatgctggttttggattggagaagtaattggcaagaggaacatgattggatatgacgttcaagtataagtcatgccatcaaaaaaaggttagaaatgtatcttttcaatttancaggcattggttaacactcatattgagatttggccatgga

SEQ ID NO: 15292 - DNA, 582 bp, Glycine max
  misc_feature (304)..(304): n is a, c, g, or t
  misc_feature (370)..(370): n is a, c, g, or t
  misc_feature (431)..(431): n is a, c, g, or t
  misc_feature (440)..(440): n is a, c, g, or t
  misc_feature (456)..(456): n is a, c, g, or t
  misc_feature (474)..(474): n is a, c, g, or t
  misc_feature (476)..(476): n is a, c, g, or t
  misc_feature (530)..(530): n is a, c, g, or t
  Coding DNA Sequence Number=SeqID_5513
gcctcttatctcagatgactcagcgacactaatttagtatgatatactaatatcacatctcttcctctgatttatatttgattttatgttatacttttcacactaagacgtcgtgtctacgactattgccaagtcgctgcatgtctgcagtccacgtggacgcaggcgagtggttagtgactgccacactgtatccattcacgggtatgattatgtagtctcgtcgtccgccttctgctctgtcgtgactatgtggatgacgagtccatgcctcagccgtgagagtgacacgtaggacaatccncaagcagatagcattgtcgtctctcccgttgtctccatcatctctctccctcacgcggtcctcacnctcagagcaactcgtctactacctcattattcagctatcactaatatactgtatcatagcnagagctacnattacatatttcactnttgtgatcatgcgcaatngncattcttacgacgagtcatagagtcagcagatacacgcatcccctgctgtcaancatcgagcaacgagcactgaaaaacgtggaaacatacactcacgacatcaga

SEQ ID NO: 15293 - DNA, 511 bp, Glycine max
  Coding DNA Sequence Number=SeqID_5514
gtgatagtcactcccaagcgcaataccatctactccacaactttatgtcgctcccaacaactcacaatccctccgaaacaaacccaggcacgtacgggatgaaaaacatgtaacaaggtgtatatgagattattagatgaatgaaatatcaggggggtatgtatcgcgggcgtgggcgggcgttaatgtggcgccacaacgggggggtactggggtgagcggcagcgttggtaatggaacggggcgggtccagatacagcgtaaccgatcgtgcgcgtggaggggataggggagcgggggcaaagggagctgttggtccccccgccagccacgcgcccacccgcaaggagaaaacacataagagcccatataacatggtgagttcgtatttgtgaaatacatgtctacagacactatacatttaaattattcaccctcctctagaagtggctacgcacagacgcgccacagcggggcggacgtgtaacacatctagctagcgcgaaggcgg

SEQ ID NO: 15294 - DNA, 560 bp, Glycine max
  misc_feature (51)..(51): n is a, c, g, or t
  misc_feature (54)..(54): n is a, c, g, or t
  misc_feature (58)..(58): n is a, c, g, or t
  misc_feature (89)..(89): n is a, c, g, or t
  misc_feature (101)..(101): n is a, c, g, or t
  misc_feature (123)..(123): n is a, c, g, or t
  misc_feature (138)..(138): n is a, c, g, or t
  misc_feature (140)..(140): n is a, c, g, or t
  misc_feature (154)..(154): n is a, c, g, or t
  misc_feature (213)..(213): n is a, c, g, or t
  misc_feature (217)..(217): n is a, c, g, or t
  misc_feature (220)..(220): n is a, c, g, or t
  misc_feature (230)..(230): n is a, c, g, or t
  misc_feature (249)..(249): n is a, c, g, or t
  misc_feature (297)..(297): n is a, c, g, or t
  misc_feature (299)..(299): n is a, c, g, or t
  misc_feature (303)..(303): n is a, c, g, or t
  misc_feature (334)..(334): n is a, c, g, or t
  misc_feature (350)..(350): n is a, c, g, or t
  misc_feature (370)..(370): n is a, c, g, or t
  misc_feature (393)..(393): n is a, c, g, or t
  misc_feature (397)..(397): n is a, c, g, or t
  misc_feature (405)..(405): n is a, c, g, or t
  misc_feature (410)..(411): n is a, c, g, or t
  misc_feature (427)..(427): n is a, c, g, or t
  misc_feature (429)..(429): n is a, c, g, or t
  misc_feature (449)..(449): n is a, c, g, or t
  misc_feature (461)..(461): n is a, c, g, or t
  misc_feature (469)..(469): n is a, c, g, or t
  misc_feature (507)..(507): n is a, c, g, or t
  misc_feature (512)..(512): n is a, c, g, or t
  Coding DNA Sequence Number=SeqID_5515
gtcgacgacggaagccgctcctacagtacgacgctaccaggacggcggagncangcgngtcaagggagtccggagtggcgccgcggcgnctcccactcccncaatcaggagcacacccctcanccgtagacgcagagnangtgtgtgagtatcngtcgatctcactggagtgtgaggcgccgccgtgtgtgtgtgcagtggcgctgtgacacnacgnagntcgctcgcgngtgtcgagtgttgtagatntgcgagtagttttatgtggtgttgatgatgaggtcgcgcgtggtgtgngntcgngaagcgcgcacctgcaccgcgcgctatatangcgcagcgccgcacancagaggcacaaccacacganagacacacacatagaaaataganaaanaataaganacaanncagaaccacaaaatananagaggacgtcgagagagtangaagagaaaggncgatgggnagagccagagagacagaggagaaaggaacgaggaaggnagacnacgagacagaacaggaggacgcaaagagcgaaagacgacacacagccc

SEQ ID NO: 15295 - DNA, 518 bp, Glycine max
  misc_feature (96)..(96): n is a, c, g, or t
  Coding DNA Sequence Number=SeqID_5516
aagcgttgtgcgtacggcacggacaacggtggcgtcgttgcccttaccgccacgcttgtccaatccattccgctcgcatatgcgagaacgtctccnggccgcaccaggcctgcctcgccctcgaacattatataccaactacattttcgcgaagtccgtcgcagattttcatccatcgtctatcctttgtctcgcagaacgtctcgccggtatggccggacaatcgcagcgactcccggcgtcctgtgcgacgagagtcctacaaaacacgcgtcttaggagacgggagagatccatacaatcttcattgtcaggtatgtcgttaggaggccctagggctcccgatgatatcatatatgactctccgcgggagaagtaacgttcccattccatgtttttccctttactcgcgtccaccccttacgacggcgagaagaacaaaaatggaaagcaagtggacttcctctgccacggcacggagaggaatctcttctagtttgtatgagagcccggcacca

SEQ ID NO: 15296 - DNA, 589 bp, Glycine max
  misc_feature (62)..(62): n is a, c, g, or t
  misc_feature (80)..(80): n is a, c, g, or t
  misc_feature (88)..(88): n is a, c, g, or t
  misc_feature (214)..(214): n is a, c, g, or t
  misc_feature (240)..(240): n is a, c, g, or t
  misc_feature (257)..(257): n is a, c, g, or t
  misc_feature (327)..(327): n is a, c, g, or t
  misc_feature (330)..(330): n is a, c, g, or t
  misc_feature (358)..(359): n is a, c, g, or t
  misc_feature (417)..(417): n is a, c, g, or t
  misc_feature (419)..(419): n is a, c, g, or t
  misc_feature (522)..(522): n is a, c, g, or t
  misc_feature (560)..(560): n is a, c, g, or t
  Coding DNA Sequence Number=SeqID_5517
ctcctctcgtgacagtctactataatctcttgtattgagacatatggatcacgcgacatcgnctctgcactagtctatantgcctacnctcatcatctctcacactaactactattgtcacacgagtctgagtctactctgttgtatcatgtgcctattatcatgtgctgctcagcgcgtgttatgtgatgacgcgtgctatatagagacacgntactctgactattataactacgtcangccatgcacattcgttnacatctcgtgtatctaactcttcgtatcgttcgaccactaacgctgataagacacctacgttatatgtcncancaccatcttcactcgcacatatctacgnngcgtctctcttcatctcgtctcgcgtttgtatctatctctgatattcatctttccgcntncattactcatgactctttgatctattatcatgctatcaatcgatcatactactctgctgctaactcgctctcatacatagatatatacaccacagatcttatnatcaaatatgacgatctgtctcgaatacatacgtgcanctcgtcgccgaactatcatctagcactag

SEQ ID NO: 15297 - DNA, 556 bp, Glycine max
  misc_feature (34)..(34): n is a, c, g, or t
  misc_feature (101)..(101): n is a, c, g, or t
  misc_feature (159)..(159): n is a, c, g, or t
  misc_feature (236)..(236): n is a, c, g, or t
  misc_feature (250)..(250): n is a, c, g, or t
  misc_feature (289)..(289): n is a, c, g, or t
  misc_feature (295)..(295): n is a, c, g, or t
  misc_feature (298)..(298): n is a, c, g, or t
  misc_feature (361)..(361): n is a, c, g, or t
  misc_feature (436)..(436): n is a, c, g, or t
  misc_feature (465)..(465): n is a, c, g, or t
  Coding DNA Sequence Number=SeqID_5518
tggttgttttgtccctgctctccagcgcgacgcngtcgcgtcggcgtgtgtggtataataagaaaagatcgactgacatatattatatgaagaattatatntaataaataagataatagacatatctcgcaaagaagaacgacaagtcagcgtgctatntgcggcgagtaagactatcaaagagatggtcagagacaatcagactaagacatgtcggaagtgtgtacagcacatgnagggcggcagatanaaacgacacaagaacgtcgtcgctgcgcggctcttacgntgtggngancgaaccaccgacaccatcggtcctcgtgtgtgtttaatctgtcttcattttatgcatatgtgnattcttctcgcctctcctcatacacacctacacgcctaccgactacacacgcactactacacatccacacacacncgcagcaccagcagcacgctacatattancagagatgaggacgacgaggacagggcgcatggccgtacaccgctgcacacaaggcatagctcagcagtcgtcagtgtctctatcgtctgc

SEQ ID NO: 15298 - DNA, 500 bp, Glycine max
  Coding DNA Sequence Number=SeqID_5519
gggtgtgatttctattggtggcaacaagcatatgcggagcacttggctgggcttggaccagtcgtgcctccattggcgcagatcaatcagggagaaaatggcatcggaggagcagatcaaggtggtcagatgcagccggcggatctagcaggaggccagtagatcggagggctggatgcctccaacatggcatccacggcggccgatgttgcaaggtcttcgatccacgtggtggctgttggtcggcgtcaggaagccacaactcttgatcccgcatttatcaatatggtcatgtctgtcggcaatatggctatttgcgttgccatcctttactggttgtggctgcaatcgtgatcgatgcgcttgatgagtcgatccaatattagcagcttatggatgcttagtaggtgtcaagggttaagtagtattagcggtgtgcgcgtgttagccatatgcttttggcttggtaaccttgttgcttgtatgtttggacctatggc

SEQ ID NO: 15299 - DNA, 276 bp, Glycine max
  Coding DNA Sequence Number=SeqID_5520
ttgaggtctggaaccggtccgaattctattcccggtcataacgtaaccgttcactgcactggtttcgggaagaacggtgacctttctcagaaattctggaccacaaaggatactgggcagaaaccattctctttcaaaatcagccaaggttctgttatcgaacgatgggatgaacgtgtgcttggcatgcatattggtgaatttgctcgtctccggagctcctcctattatgctaatggcagctggtgctttcctgcttagaaaatacggcccatc

SEQ ID NO: 15300 - DNA, 452 bp, Glycine max
  Coding DNA Sequence Number=SeqID_5521
gaagcaccacaatctggttcgggcattgctcagagtctgccaaacagtggccacattggaaaccaacatgatcagtttggatcgggtggaataaaatttagcacccagtcacctcaggaggactttggtacccaggcatcacatgaagtggctgtcaagtatgctgagcgatactaaaatggcaaccttgtcctcaaaatcaaacatggcctaatttgaggagcagggcattgtgaaacaattatgtcgtatttgtttggagcaaggtgctgcatggatgcaaatgtctgttagccgatcaagaacagcaggagttaggcgatcaaatgggtttggctgtagtaattttgagtaccatttatttgcctcagttacatttggctaactttggtctagtataggcttgtaataattaggcatgataattcacatgcactatgagttgatctact

SEQ ID NO: 15301 - DNA, 544 bp, Glycine max
  misc_feature (35)..(35): n is a, c, g, or t
  misc_feature (266)..(266): n is a, c, g, or t
  misc_feature (287)..(287): n is a, c, g, or t
  misc_feature (360)..(360): n is a, c, g, or t
  misc_feature (402)..(402): n is a, c, g, or t
  misc_feature (425)..(425): n is a, c, g, or t
  misc_feature (475)..(475): n is a, c, g, or t
  Coding DNA Sequence Number=SeqID_5522
atatttatgtcatcgagcgccgtggctgcgggagntgatttataaagctaatcttatgtcttacttacaccaacgtatatatgtgttctactgagtatgttgttttcatcatgaaattatatattatatatatgtcggctgcttgctcgcatatatgttgtgtctattctgtatcgtcgcgctatgctccgcgatcgcatatgcgcttgttctcgtgctcgtctctcgctcgttgtgtcggcgttctcctttgtatacatcctccnctacttttatcttatcaacancgaagtacgtgaactgcacatatccgaaactatcactatgtaactgtatcctattctattcacagacagcctntctaatcaccgatgctcacatcactacgtcagcactcatttntacgccctcgcctttatatattncctctactcgtccgcggtctgactgctcattatctccgctacctgtctcnctgctcactatctcctctcagttgtctaccactctctcactctcatcgcctacgtctcgatatctaatc

SEQ ID NO: 15302 - DNA, 529 bp, Glycine max
  misc_feature (69)..(69): n is a, c, g, or t
  misc_feature (174)..(174): n is a, c, g, or t
  misc_feature (324)..(324): n is a, c, g, or t
  misc_feature (420)..(420): n is a, c, g, or t
  misc_feature (504)..(504): n is a, c, g, or t
  Coding DNA Sequence Number=SeqID_5523
acaacaatatgctcgtggacacaactgagccgagcctactcaccacctcgatactgtgtttgtccagcnagcggcgcattcagaagcgagaggaggtgagtacacaacctcctcgactctacagagcgcgacgagctgttgagtaagctaacactactaaagttatacctcccnccgcgcgataccatgatgagattacacctctatgtaagtcgagaacaaactaataatatgttgataccgcgcacgtgtccaccacccctaccacagctaggatgagaggtgagtgaagagagcattagcgcacgaccacacaatgatccncacactactcatcgtcacaaagatacctcaagacaacagctaccacgtcgactaagagagaacaatgagtacggtactacgagctataccagcganatacaacttaagtctacatccacgacgtaatcacgtcacagcatagaatagttatgacggaggatataacatcggcgtgcctcngcactcctgagacctgatgcgtctg

SEQ ID NO: 15303 - DNA, 536 bp, Glycine max
  misc_feature (56)..(56): n is a, c, g, or t
  misc_feature (112)..(112): n is a, c, g, or t
  misc_feature (280)..(280): n is a, c, g, or t
  misc_feature (417)..(417): n is a, c, g, or t
  Coding DNA Sequence Number=SeqID_5524
gatagagtcttctgtatctgcagtctcacacgctaatgcttatgtttcagatcatncagctccgtgtatcgcgatagctattgtcacgagacatgcagagtctgtcctgagntgctccgcgcgacgatgagagagagagtgaccgatgcgttatctctctacagatgtgttgacaagacgctacttatcactattactgatagccgtcggaacgctagtctctcacgccgctcatatcgatcgcgttgtacatattcataaccaacgcgccacggatatncaagatcgcgctgatgttgtatcacagcttactagaattgcagtgatgtctgttgttgtcatcgatcggtggctgtctcggcacagcgtctgtaattctgacttgacattgatcgccatgactaaactgtgtactangtgcaacatcggtgtgccgtcgcagtctagcggcgactacgactgtgacgtgcgtcgcgctggctgcacgacgagtacgtccggtgctgtgcgcatgtcgagtatatgtacgccgtccc

SEQ ID NO: 15304 - DNA, 253 bp, Glycine max
  Coding DNA Sequence Number=SeqID_5525
cgcaaccgaaaacactccttctactccttcttcttattcttcttcttccttcccttctctcatacaagacaggcctgtctttgctgcccctgcccccatcatcaccccaactgtgagagaggatatggcaaaggaatacgagcaagctattgaagaactccataaattgctgacggacaagagtgaactcactaccacatctgctgataaagtggagcacataacagctactctgagaacatcatgatctgat

SEQ ID NO: 15305 - DNA, 432 bp, Glycine max
  misc_feature (27)..(28): n is a, c, g, or t
  misc_feature (33)..(33): n is a, c, g, or t
  misc_feature (42)..(42): n is a, c, g, or t
  misc_feature (44)..(44): n is a, c, g, or t
  misc_feature (46)..(46): n is a, c, g, or t
  misc_feature (58)..(58): n is a, c, g, or t
  misc_feature (128)..(128): n is a, c, g, or t
  misc_feature (150)..(150): n is a, c, g, or t
  misc_feature (202)..(202): n is a, c, g, or t
  misc_feature (205)..(206): n is a, c, g, or t
  misc_feature (221)..(223): n is a, c, g, or t
  misc_feature (225)..(225): n is a, c, g, or t
  misc_feature (234)..(234): n is a, c, g, or t
  misc_feature (242)..(242): n is a, c, g, or t
  misc_feature (244)..(244): n is a, c, g, or t
  misc_feature (248)..(248): n is a, c, g, or t
  misc_feature (251)..(251): n is a, c, g, or t
  misc_feature (254)..(254): n is a, c, g, or t
  misc_feature (257)..(257): n is a, c, g, or t
  misc_feature (271)..(271): n is a, c, g, or t
  misc_feature (274)..(275): n is a, c, g, or t
  misc_feature (279)..(279): n is a, c, g, or t
  misc_feature (281)..(281): n is a, c, g, or t
  misc_feature (291)..(292): n is a, c, g, or t
  misc_feature (318)..(318): n is a, c, g, or t
  misc_feature (335)..(335): n is a, c, g, or t
  misc_feature (337)..(338): n is a, c, g, or t
  misc_feature (341)..(342): n is a, c, g, or t
  misc_feature (347)..(348): n is a, c, g, or t
  misc_feature (350)..(350): n is a, c, g, or t
  misc_feature (356)..(356): n is a, c, g, or t
  misc_feature (399)..(400): n is a, c, g, or t
  misc_feature (404)..(405): n is a, c, g, or t
  Coding DNA Sequence Number=SeqID_5526
aagtatcatgattacataatgacgaanngcatntctatgtcngngnagtgatagaccnactcgtcgcgttcgaagtgagagagatgacgagagatagtatgagacggacgagtgtgtcgatagagacnagatctctgtataatccgtagncgactagactacgattgtaacatatacatctatgagtaatcacagagtatgncannataagtagttaatcnnngngaggcagangaagaacntngcgnggngantantacagatgaaaaanaannagtntngtatgtacanngtagacgccgatgggcttgtgcgccncacgtggtcgcgcgagntnntgnngccgnngngtgtgntgtgggacgagagacagcgagcaacagagagaggagagagcgnncgcnnagagcacgcgacagagcgagcacagag

SEQ ID NO: 15306 - DNA, 476 bp, Glycine max
  Coding DNA Sequence Number=SeqID_5527
gggctcgagcctattcggactctgaggtcatggcagcatctaagacttctcattgctcctctctcgctctctatcttccacttatctctgaatgctgcttgctgctacttgactcactagggagaaactctggcaagaggggaaactataacagattcagcactgcagcagcagttgaggatgtaatcactccagcaggttccaataacatacactaagcatctgatagatggacacatctgtggatgctccttcagggagaacttttccagcatatgatccacgcacaggagaagagatcgctcaaggtgctgaaggtgatgcagaagatatcaaccgagcagtatcggcagctcgcaaggccttagatgaaggaccttggccaaaagtgactgcttatgaaagatgcaagataatactgcgctttgctgattggcggctgagatacaccggtgatgaactctagcagctctgga

SEQ ID NO: 15307 - DNA, 577 bp, Glycine max
  misc_feature (409)..(409): n is a, c, g, or t
  misc_feature (431)..(431): n is a, c, g, or t
  misc_feature (472)..(472): n is a, c, g, or t
  Coding DNA Sequence Number=SeqID_5528
ccacggcgacgggagttattatgatttacgtcctcacacccacacctactccgtctattttgctcaagacctcaccctactgcgtgcggtgtagagattatgtgtcagggactacacagcttcccctacacctctctactcagtgctaactcgaatgatatattattattttcgtgtatagacgatatacaatccacatattggcccacatattgacaacattctgagattaagcccacgtttcccgcctccaggacccgacccctagccatccaatataatgtacgacctcaccctaaacgtgcacgaagaataaactatctaacctccgtacacgcatcttgtcgcttggtgtctcttctacggcatcatcgtatcatggactgcgaaccgcgcacgagtacctatngatgatagagaactgtctatcncacacgtgggctgtctgctaggttgcacattgttcgcgagngctggtttagagagcagtcgagtacaagtatcgatattagtgtggctcgatgtcgggcggtcgaagactgtgcctcgatataccacatgaaatgatcccaccaac

SEQ ID NO: 15308 - DNA, 306 bp, Glycine max
  Coding DNA Sequence Number=SeqID_5529
gtgaattttactgagcgatggcgacggcgaagagaaagccggtgtttgtgaaagtagaacagctgaagcctgggacgaccggtcacacgttgactgttaaggtcgttgattccaacccggtggttccgacaacccggaaggctcgtcccgggagctctatgagccgtccgtctcagcctagtcgaatcgctgagtgtctcatcggagatgagactgggtgtattctcttcactgctcgtaacgatcaagttgatgtcatgaagcctggagaaacggtgatactgcgcaactcgaggattgacatgt

SEQ ID NO: 15309 - DNA, 497 bp, Glycine max
  Coding DNA Sequence Number=SeqID_5530
gcaatggcaaacacacaatcctcgttaatgtgcgtggcaaacccattcagaacagccctttcactgttgaagctgtgagattaggagtggatgttacaaagacagaagcgtatggcccaggattggagggagcagtgaccaaagagcctacccacttcacaattgcaaccaaaaacaagaatggggatcctattcccaccggtggagagaagtttgacatcaagattgctggtccttacaactctgatgtcagaccagagttggttgacaacaaaaacggaacttacacagtcaactacaagccattagacaaaggaaaccacaccattaccatcttacacgagaaccaacacgtagccaacagcccatatcacatagtggtgaatgctaataaagatgccgctgatgcgggcttcagtttggcatttggacctggaattgaggaaattgtcagcaaatgatcccacttccttcaccatccaggcatacaacagcaa

SEQ ID NO: 15310 - DNA, 186 bp, Glycine max
  Coding DNA Sequence Number=SeqID_5531
cccgacctgcagtcgttttggtaagtttgtggagattcaatttgaccagaggggaaggatttctggggctgctatcagaacttatctgctggaaagatcacgtgtttgtcagttgtcagatccagagaggaactatcactgtttctatatgctctgtggtgcacctccggagactgtctgacaatg

SEQ ID NO: 15311 - DNA, 528 bp, Glycine max
  misc_feature (127)..(127): n is a, c, g, or t
  misc_feature (136)..(136): n is a, c, g, or t
  misc_feature (304)..(304): n is a, c, g, or t
  misc_feature (330)..(330): n is a, c, g, or t
  misc_feature (339)..(339): n is a, c, g, or t
  misc_feature (400)..(400): n is a, c, g, or t
  Coding DNA Sequence Number=SeqID_5532
gttcgttcatcattcgtgggatctcggttagcggcacacgctagacaatatataccgatgatgggataggcgtcgtaagtctatagtggttggtgtgtttgtgactgtggtatataagtgggtgagngtgtattantaactcccctcctcgcacacatccgactgtgactctggtgatcacaacactgcatagcatgagagacctcacctctatattcttgctggtgttcatacacacataccatacctgcgcgatctgttcacgaacacatgtcaactaagatcaaacacgaccgcggcggcncgagaagcatatatggtgtctcgcgntcatagtgnattacacatggtgtcacacagctgtgcgctctaacaatctacaactattcatcgctctganacacttgcgtggtgtgaatcataacacacatgcaatgtgactgctcaactattgatggtgtgatgtggcggcgtttgctgttgatgtacggttggtatatatagatatatatattcttgcgtgcggtg

SEQ ID NO: 15312 - DNA, 581 bp, Glycine max
  misc_feature (43)..(43): n is a, c, g, or t
  misc_feature (196)..(196): n is a, c, g, or t
  misc_feature (383)..(383): n is a, c, g, or t
  misc_feature (435)..(435): n is a, c, g, or t
  Coding DNA Sequence Number=SeqID_5533
aaatctagcgcctttgttggtgtcatattcaccctccacgtanctaactcaacttccatagtcaggtgtcatatctacacacaactggataatccaaatactaatataattctatgttatacgaacacacaacacatctataaactaatgcgtaatagtgttgttacgatgctacatacatacgcgtcgcatgcgnctacactacggatgatatcacctatacagctacacaatttaatcttggctgctagatgatatatatagctctctaatatcatcataatatacacaacacaacacaatataccggcgtatccataacacaatcaactgtgagagatcaaacacacttgagtggaacgacatcaacaaactcttggtgnatatcgatctcaccacaactacatacgacgatatactaacccacaaccatgncgatagagaataacataatataattcaatacaacgattcaatatctaatcccgtggccgcgatgctcttaattattccgtgaccgagaacattgtacagctcactacataacgctatacttgatacagttgggtgtgcgacctata

SEQ ID NO: 15313 - DNA, 429 bp, Glycine max
  Coding DNA Sequence Number=SeqID_5534
aaggttctcagaacggcgtcggctgcctctaggaagttattagcagcagcacatccggcgccttcagccgtatcaccgccaggtgtgacgtcatcttccgctgtaggagcatttcttggtattatcgaagttcctcgctccaccaccgatatgttgatctccaagtacatccgactctcccagaaccgattgacgaagaagggtgatttcactgaggagaagctaatgacaatgttgtctggtaatgtcgggatcagtgagactgtcaagttactcgatggccgcaaaactagcgctgacttttcttctccaaagtcaaccaacgttccgtccattgccaagcccaagaagaagaaatgaaaaaattcctctgttttgttcagttttttttaacgaaccatataaagcttcaagctttttgcatttcta

SEQ ID NO: 15314 - DNA, 249 bp, Glycine max
  misc_feature (26)..(26): n is a, c, g, or t
  misc_feature (34)..(34): n is a, c, g, or t
  misc_feature (40)..(40): n is a, c, g, or t
  misc_feature (47)..(47): n is a, c, g, or t
  misc_feature (50)..(50): n is a, c, g, or t
  misc_feature (74)..(74): n is a, c, g, or t
  misc_feature (105)..(106): n is a, c, g, or t
  misc_feature (115)..(115): n is a, c, g, or t
  misc_feature (118)..(118): n is a, c, g, or t
  misc_feature (124)..(124): n is a, c, g, or t
  misc_feature (163)..(163): n is a, c, g, or t
  misc_feature (213)..(213): n is a, c, g, or t
  misc_feature (223)..(223): n is a, c, g, or t
  Coding DNA Sequence Number=SeqID_5535
ttcgattaagtgaagttgttctgcancattctancatatnactatgntanacttactactcatttgctgacttnagataactgtggctgagcgtcgacagtgtanncacgactgnatnatgcgnatttttcatctgtactccactagactattagtaagtatnggtataagtcatcattacatgctttcgcactatggcataatagtctcagncgtacgtgtncgttgacgatacataaagtgcacgta

SEQ ID NO: 15315 - DNA, 360 bp, Glycine max
  misc_feature (27)..(27): n is a, c, g, or t
  misc_feature (30)..(30): n is a, c, g, or t
  misc_feature (39)..(39): n is a, c, g, or t
  misc_feature (62)..(62): n is a, c, g, or t
  misc_feature (67)..(67): n is a, c, g, or t
  misc_feature (82)..(82): n is a, c, g, or t
  Coding DNA Sequence Number=SeqID_5536
gaccgagctggcacggcatggccaacnagngcggctgcnggcagtgttggcgccagcagggncatgntggcgttggcacgcnctctgtcacctggctgtgcgggcccaccagcgttggcaaaacacatttgcatgcaatcgatcgtcgcgcgcgcgagccaacgcggtcgcactggctacttcccgctcattgagctggcacctctcggcgtcgagcgttctcgatggcctgacgtctctcgattgcctctgcctcgatgacctggatcaggttgtcggccagttggattgggagaaaaccttgtttgggttgctgcgcgaaatccaggagcgcgacggcaatctggtggtgtcggccaa

SEQ ID NO: 15316 - DNA, 530 bp, Glycine max
  misc_feature (96)..(96): n is a, c, g, or t
  misc_feature (211)..(211): n is a, c, g, or t
  misc_feature (380)..(380): n is a, c, g, or t
  misc_feature (397)..(397): n is a, c, g, or t
  misc_feature (452)..(452): n is a, c, g, or t
  misc_feature (485)..(485): n is a, c, g, or t
  misc_feature (497)..(497): n is a, c, g, or t
  Coding DNA Sequence Number=SeqID_5537
atgacctgtctctgtacgctgagagactcactctctcgtctgacattactgctatgatctgatctatctctagtatatatctatgtatatatatcnacaccaagccgcacggagagatacctaactcactacatcacctcacatactaagagtattgcgtcatgtatctatgatagatgtgtgtgcactgtgcgactgtgtggatagaccngcatcgcgtggacagtgtcacacactctcacgacgcgacgcgactccgcgtcgctctacatgatagcatggtactacatcaacgatagtatgcgtagcttcgagcagagagtactaccagtgtcgcacgtatcgttgtgtcgacgatcgtcttctcttactcttacacnatcgtacatcctcgganacagcgatgcattgtctattgctccctgtatcgccgtatcatcatgcactcacangacgccatagtacgacatatatatatatcagtngatacgacgccnacgacaccatcgcatccacacgatcgacatatg

SEQ ID NO: 15317 - DNA, 362 bp, Glycine max
  misc_feature (62)..(62): n is a, c, g, or t
  misc_feature (65)..(65): n is a, c, g, or t
  misc_feature (72)..(72): n is a, c, g, or t
  misc_feature (74)..(74): n is a, c, g, or t
  misc_feature (193)..(193): n is a, c, g, or t
  Coding DNA Sequence Number=SeqID_5538
gttgccagtgtatccactggttcgcagtagccttagatatgccggcgtggtagtggtgttgncgncccagancntttgtaactgtcggtcccagccctccaatagtacgcgcgtgtgggcctgcatctgttgaacacagccgtctttcacacctagagacgactgcgctaacccccttgatccatagcacgantctttgtcactccaggagaaaggtataagcatctggtgatattcgtcagaatcgcttccatgcatcacgagtagcagtagcttcttcatggtggcgtaatctcccatgaactctctcttgcgatggtattcgtttgccatgttggtcgttcagcactcttcaaagcgaa

SEQ ID NO: 15318 - DNA, 417 bp, Glycine max
  misc_feature (76)..(76): n is a, c, g, or t
  misc_feature (142)..(142): n is a, c, g, or t
  Coding DNA Sequence Number=SeqID_5539
aaagcacaaccgttccaatgacgtggacggcggcgaggcgaagaagctgctgttgcagcaaggcgaggcggacccngcggcggcgctggcgaacgcacggcacaagttctgggagcacggcggggtgaacatgtcaatcaangcgtctgcaacattcaccgtgataaagccacagacaatacaacacatgttctccaaagaactcatccccgaccgcaacttcttcatctacaaccaccacttcaacccaacaatactaatcctcagtcacctcataaccaccctccataacaccaagagcagctactacaccaccaacacatatccaccatgctcccatcctgctgcatctctactatcagcacgaacacataatcgctccagaactctctactataagacgcacgcgctgcttca

SEQ ID NO: 15319 - DNA, 506 bp, Glycine max
  Coding DNA Sequence Number=SeqID_5540
tggtaggcagcagtttgtcttcactgctaaacaaatggggtctaggagttggagttcttgcaagacttttgcggttatgggtttggttttctctgctgctgaatgcattatcgagaaggcaagggcgaagcatgacacaacaaacaccgcttttgctggatgtgtgaccggtggctcaatgtctgcccgaggtgggccaaaagctgcgtgtataggttgcgctggctttgcaactttctctgtactgatagagaagttcttcgacaggcatacgtaaaccaacagtatctctaacaaacgccattgctgggaattgtttagctgtttcctttctgtgattctgatacagttcatcatcacctgagcacagggagagggaaatctagaattacatttttcaaacatagaagagtgaagcttgttttgattgaatatttgttcagttgttgtcattatttatcatagtttttggtaacactcagtgctccaatattacagtgttcctc

SEQ ID NO: 15320 - DNA, 273 bp, Glycine max
  misc_feature (202)..(202): n is a, c, g, or t
  misc_feature (242)..(242): n is a, c, g, or t
  Coding DNA Sequence Number=SeqID_5541
cacaccctaaccaacgtgatctttgaaccgttcgaaaaggtaaaaaaagagctcgatctcattcccaccattccacaagcttctctcgcccaccaaaaatacgttgacgaatcctaagccaccggtaacgaacaaatcaatgtgaagtataacatttcctacgtttaccatactatatttacatactttaatgaagacaacnttacactgaaaagtcgtactaagtgtgttaaagaatcganttaagaagatagataacatccttataaattg

SEQ ID NO: 15321 - DNA, 594 bp, Glycine max
  Coding DNA Sequence Number=SeqID_5542
gtgtgaccaaaatcgctacgcctctatctacgagcaccagatctatattcgtgcatccataccaccctgtgtattagctctatcgtaggatcgcaacacacactacactcactctcctcatatatatatcaacacgcggttagtgataaacgttcgttcacagagaactacttgcgtcaccaccgaaactcatgtctcacatacacacatcacatcatgcccacaccacacacgtgcgcgaacatctcccacactctcttaaacatctcttctcatataaatgctatcatctccctatctgtatctcgccaatcctatctcacattagaacgattcccacctccgtctcatatatatgatctcatcagatagtcgcagtatatcttgtatactctcacaactctacatactgcaatcgtcccactgcttcacaacatactctgatgctctctctccaatcacattgctcacctacccacatcaattcacctcttgtatacaacacccacctacgtcccgtgcgtcacgtccctaccctatatatcatatacatactacacatactctaccaagacaatgatcccctctcataag

SEQ ID NO: 15322 - DNA, 544 bp, Glycine max
  misc_feature (396)..(396): n is a, c, g, or t
  misc_feature (400)..(400): n is a, c, g, or t
  misc_feature (491)..(491): n is a, c, g, or t
  misc_feature (494)..(495): n is a, c, g, or t
  misc_feature (498)..(500): n is a, c, g, or t
  Coding DNA Sequence Number=SeqID_5543
tacggtcgacgattcatgaacgggtatctcctacacactcccgctcgagtcatcatctagcgcccgactcaacagcaccactaccacgtacattctcgcttccttaacactcattctccatcagcacaccaaccaccgtccccctcactcactcgttctatattatatatcggctctgtcatgctcgacgcatgccagctcccacaacacctcgcctgtctaaatatactctccactctggcacccccggtggttctcctctattatctctctaccttcctctgtgtcgtgtgtgcggcctcataaatactaactgtgcattctcatacacttcacacacattatagtggcggtaaacatcaccctgtctcttcacctcatatacaataaaacaancaanttatatgcctgtagttctgtctgctcccttcccgtcctcttgggaagaggcgggctgctctcctttacctccatatttcagacataaaaanaanncgnnngggggggtggatattctccactcaaatctctccattctgttttt

SEQ ID NO: 15323 - DNA, 434 bp, Glycine max
  Coding DNA Sequence Number=SeqID_5544
atatatacattctatccgcgacgctattggtgtgcagagagtgtggccacatctgcaagtgacaatccgaggggacgaggtcgtggtgtgagtcgctggtgtgtgtggcttattagtgttttatgtaggtgatgctctcaagaatcggaatgatgcactttacctgatcttgttaaagctatgtcgtgcgttgtggtatttggattgagacattctttatttatcatacatcatggttgaattcagtaagcgtacgtagtggtgtggccaattcacttacacgatcttagaagcccataccttagagtgggcggtgtgggtctctatcggccgaagaatgagctagtcatccctgcgttcagtgcggagtgaacatgacattagtgtgctgtagctgtcctaccttgaagtgagaggtggttactttgtctgta

SEQ ID NO: 15324 - DNA, 321 bp, Glycine max
  misc_feature (88)..(88): n is a, c, g, or t
  misc_feature (98)..(98): n is a, c, g, or t
  misc_feature (116)..(116): n is a, c, g, or t
  Coding DNA Sequence Number=SeqID_5545
gcgcccgggcgtacctttactgcaacctccggttggcaacccggaaccccggccggggccccccccgggggattagactgaccccccnaatctaccgncgagagtaggccgttaancggggagcccgcccttacccccgcgcgcccccccatcttttcgccacgttttctccctgaggaaatgttggttagggctcccgcccgcgattacccaaccccccgccttcagaggttgtttgttggcttattgccgcgcccggcccccccccggggaggggggtcccgcgggccgcgttcaacgcgcgagcgaccaacatcgcgg

SEQ ID NO: 15325 - DNA, 494 bp, Glycine max
  misc_feature (39)..(39): n is a, c, g, or t
  misc_feature (41)..(41): n is a, c, g, or t
  misc_feature (79)..(79): n is a, c, g, or t
  misc_feature (125)..(125): n is a, c, g, or t
  misc_feature (369)..(369): n is a, c, g, or t
  misc_feature (371)..(371): n is a, c, g, or t
  misc_feature (387)..(387): n is a, c, g, or t
  misc_feature (450)..(450): n is a, c, g, or t
  misc_feature (452)..(452): n is a, c, g, or t
  misc_feature (456)..(457): n is a, c, g, or t
  Coding DNA Sequence Number=SeqID_5546
atgcggccacgctctatagcgcgcatcaccgtgctcgtntngcacgcacacgcccctccgctccgtcgattttgttctnctcggtatctcgctctctgcgcgctcgagtctcgctcactacatanacttttactgataaagtatataatagatcgaccataggagcgcagtgaggacgtgagaccgccggcatcggcgacgcgaactcagcatgtggcgcgacagcgactgacatatagtgcaatgtgtgctctagtgctgtggtgtcattagtcgtgcttatgatcaagtagataacctctcatcatctcactctaactggtctagcacatgtgggcggagcaacgagagtacatgcgcgatatatananccacacagccgtctcncacgcaccggtgccgtggagcgctgagctcccgatgcacactccgcggtgtaccgcaccaacncncgannacgtcaccacaagactacatcacacgagatactgcgt

SEQ ID NO: 15326 - DNA, 509 bp, Glycine max
  misc_feature (31)..(31): n is a, c, g, or t
  misc_feature (57)..(57): n is a, c, g, or t
  misc_feature (124)..(124): n is a, c, g, or t
  misc_feature (165)..(165): n is a, c, g, or t
  misc_feature (189)..(189): n is a, c, g, or t
  misc_feature (279)..(279): n is a, c, g, or t
  misc_feature (327)..(327): n is a, c, g, or t
  misc_feature (335)..(335): n is a, c, g, or t
  misc_feature (389)..(389): n is a, c, g, or t
  misc_feature (474)..(476): n is a, c, g, or t
  misc_feature (478)..(480): n is a, c, g, or t
  misc_feature (483)..(484): n is a, c, g, or t
  Coding DNA Sequence Number=SeqID_5547
gtggcgaatagttggtcgtgatactatgtangtcagcgtgtggttcgcggcggtgcntagtatgacgtgagtatgtctgtatgtgggcgtaaggtacatggtagctctaagtggcacatccatnaacagctactatctactgcttcatacacctacgctctggantaagacgagtgagagtgttatatnttcttcatcatacagcgcttagttcttttctgttttgatgtttctcggtcttctgatctctgtgctgtgttagtggagtgtgattttagnagctgagagatataggaagctaagtattatgttgtgcgagttggttcngtgtgagntgtgtagtcttaaaacatgagtggttgtggggcatcacacagatacctcagagnaaaatagaatcatgacacatctccagattccatttggtgtgtttattctggaggagaggtgtgccagcagagatgggggggcggnnngnnntcnngcgacaatggaatgaccactcccca

SEQ ID NO: 15327 - DNA, 549 bp, Glycine max
  misc_feature (87)..(87): n is a, c, g, or t
  misc_feature (93)..(93): n is a, c, g, or t
  misc_feature (175)..(175): n is a, c, g, or t
  misc_feature (236)..(236): n is a, c, g, or t
  misc_feature (278)..(278): n is a, c, g, or t
  misc_feature (360)..(360): n is a, c, g, or t
  misc_feature (367)..(367): n is a, c, g, or t
  misc_feature (453)..(453): n is a, c, g, or t
  Coding DNA Sequence Number=SeqID_5548
aagaaggaatgcagcacctccgcctcgctttctagcgcatgtcgtgtgtgtgagtgaggagagatagtaggtcagtgtgacggagtngtgtcnggtgttgctgtgaagcgcgggagggtgttgatgatcgcaggtgtatgagcactgaagcaagcatgagtggaactacaggganctagcgtcatcctatgatgttagtagagcagagcgcgtagcaaggatctattatataatgngaggtgttgtgtcgcaagaactctagcgtgcatctatcctancaactcagacctcgtcgcgaccttgtgctctgcagtaagtctgcataggagaagcactacgcagatagtataggactcgtcnccaatcnctccgctgttgtgctaggtggcgcgggcgagaggacggttgtagtatgatgataggtctttcttcctcctcgcgcgctcggcgcgnggtgttctcctctctcttcacttaagtaacaggccgcgcctcgcccgccgtcgcgctggcgggtcacgcttcttcgctgtctgtcgaggtgtgtga

SEQ ID NO: 15328 - DNA, 578 bp, Glycine max
  Coding DNA Sequence Number=SeqID_5549
tcgtttctacatgtgacgtctttgagattgtgctgttatattcatcaaaagaaaatgtcgaagaagaagagtaacagtagtagttcttccatgaggaagctatcccaagctggagacaaaccttggttacagcaaaagaaacctggtaagctagggaaagagattgatgacatctttggtgggggaaagaataagaagcagctatcccaagcaggagtcaaacctgccaaaaaaactggtaaaatagggaaagagattgatgatatttttggtgggagaaagaagaagaaggtagaagtggaaacaaatgagaaagaagaggcccctgtgaataaagcaagagtggcaaagaggaagaggagcgaggttgacggattcaacagcaacccaaaaaccggaccgaggaagaggactgaagacgggttactagtgttcacggaagatgagcttggtatcaataaggccaatgctggtaatacgcctctgtgcccttttgactgccagtgttgcttctagtctcctttctctgtttgaaaaagtggatcttaagttaacgcagctttattgttcatgtttga

SEQ ID NO: 15329 - DNA, 183 bp, Glycine max
  Coding DNA Sequence Number=SeqID_5550
aatggagcaatgtcaccacaagactcagatatgtggttcagggaattagttcctttgccagtggtatgagctaccttagctatccaaacttttgctctctactacaatagtccccatccaactagatgttgttagatttagctttagtatggactagtgtaaggtgcacagtcatgagcctaa

SEQ ID NO: 15330 - DNA, 419 bp, Glycine max
  Coding DNA Sequence Number=SeqID_5551
tttgcatagtgatagaggttatccaagaggaactctggcaaatcaagaaagaaattatcataatagaaatggaaatacttcatataacagtcttccccaagagcaagaaagagttatagtaaaagatgatattaaaggtagaggaggtgctaatagtatgaaagatgattttgctgtttcttcgatgaatgataatatgaagtcaacagagacattgataaaagaaacagaggccaaaattcaaaaattgaatttggaaaaacagaaattaatggttccagaagaaagaagacaaaaagaatatcatagtacgactcctccatgggcaaatcatgctgaccatttcaataactataaaacatcaaattgttatggaaatcattacaatagattccaacctttaggtcgacatggaaaat

SEQ ID NO: 15331 - DNA, 429 bp, Glycine max
  Coding DNA Sequence Number=SeqID_5552
ggttccggcggttaaatctcacagacgattcgattatctccgtcacacgccgtcttcaccgtcgaattcttcccgccgggaacgaatggctttctggacattgataaaaggtctgctcctctttgcaaatgcgtttgcaatcctcaacgaagatcgtttcctcgctccaagaggatggacactcgaaaaactccaccaaaccggtagaagaaactctcccaaaggccaaatcatcggtctaatttacgcctgccagtacatgagattgcccctcttgctcatcaacctagtagtcatcgccatgaagattatcgccggttaaagattttgtgtataaactgcattacatatctaatgtaggaaggttctcttctacctagtcaaaagtatcccttgtagtcaagttgggtgtggatcattttacatgct

SEQ ID NO: 15332 - DNA, 584 bp, Glycine max
  misc_feature (103)..(103): n is a, c, g, or t
  misc_feature (505)..(505): n is a, c, g, or t
  Coding DNA Sequence Number=SeqID_5553
ggaggagatgccacgtatcatatattgtagtgatgcgctggccgtaaactacaccagacgcgacgagctgcgacttgaatataactaacgagtcatgattggnacccaacgtaggtagatatacacccgccctgcatacggtcggatattcacgttgttatgtccgtgcaagagaggcacccgcgattcgagatagcgacgcacgcagcagagtctcttagcgcgcgatatgtcccgtctcatcccgcctcacgcgcgttggtgtaatatcgacacgtgtgcggtatcatgtaacttaagtaatttctgcgaccactaccttgtgtgtacataatagagcatatctcactagcgtgtagcgccggacgcgcacgctggatgggcgtcggcgacggagtataatattggggtcgacggcagcgcgtgcgggtatcaatattcaaagagagcagtggcatggcgcgttgaccgcgacctcgcggcacgagaacggagacataaatantggtaacaatacgtatggcagtcgcccgcactcgcagttccgcgcgcgctcatatgtatgttataagagcgccggctat

SEQ ID NO: 15333 - DNA, 445 bp, Glycine max
  Coding DNA Sequence Number=SeqID_5554
tcctacttcacacgcacggaaggcagagagaggcgacccaaccgccccctccgctgcttcagttcgtccgctccatcccgtgtctattccgagtggacgccaacacacacaggcgcatatataggtagctttatttagctacggctgaagagagcctgatttacaagataggaggagcagatctttgaggagggagcatgccgacgggaaccatgaggaggatgttcgtcgagtcgtcctcgtcctcgtcctcgtcgtccgggagcggcagggaggcggagccggcggtggtgctgtgcgcgcctcgcccgcgcagggtccacgcccagccctgcagcgccgacctcatcctcggccctccccccttcctcctcaacgcctcctccgccaacaacagaaagcagagagaagggaagagcaaaacgcggcaggaggacgagtcgga

SEQ ID NO: 15334 - DNA, 477 bp, Glycine max
  misc_feature (52)..(52): n is a, c, g, or t
  misc_feature (120)..(120): n is a, c, g, or t
  misc_feature (252)..(252): n is a, c, g, or t
  misc_feature (279)..(279): n is a, c, g, or t
  misc_feature (307)..(307): n is a, c, g, or t
  misc_feature (326)..(326): n is a, c, g, or t
  misc_feature (336)..(336): n is a, c, g, or t
  misc_feature (437)..(437): n is a, c, g, or t
  Coding DNA Sequence Number=SeqID_5555
acaatgtacgtagaggtcccaggtcgtagatccagcccatcacagaggtcancacacacacacacctgtatagactctgctcgactcagctatgacctcagctggcgctcagatacgaancgcaccctccttattgaaaacacacgtgaagctctttgttagattacatcgcacgcccatatgtatgatgagaaggagtgctgggagcggtaggcgattagtgtatgctcccacgagaagacgcgccgcgcnagagagggcgcaccagagatgaccaangacgcgctagcacatctcgtgcagaacnagaggagaacaaagagagnaaacgaaagnaaagaatgaagcgcgactctctcctctctgatctatcgcagccccaccgccgcggcggtgctgtgagcgagcgcctaacgatctgccgtcaggctaatcgngaggcgccgcgcgcctccacgcgccgagcatgtatagaga

SEQ ID NO: 15335 - DNA, 485 bp, Glycine max
  misc_feature (284)..(284): n is a, c, g, or t
  misc_feature (348)..(349): n is a, c, g, or t
  Coding DNA Sequence Number=SeqID_5556
agccaagtgaagagccctttgccaaaggatttggcgagccaaatcttgcttcgcggagttcttccgaattgcaagaacaacttcagatcctgtgtcaggaacaaatgaatttgctcgttgctcggaggcggctcctggctgctaatgctgagcctgaggccgctgccttgcacgacggtgaataccaattaacaaagaatgagttttcaagtcttggacgtggaaaatatagtgaatgcagtactactgaatcatctgatgatattgagaagcaagagatgttnggaagtgtccgccgaagaggggatctcataccatgacaccagagagggttttacagagcctganngcaagtgtgagtgagcgggagctatgaatcaagtggacaggtgtagggaacccaacacactatacactgatacagagaacattcatcctgagaaaatggtctgcaattataagcaccctcagatagcaagacgaaa

SEQ ID NO: 15336 - DNA, 596 bp, Glycine max
  misc_feature (29)..(29): n is a, c, g, or t
  misc_feature (147)..(147): n is a, c, g, or t
  misc_feature (169)..(169): n is a, c, g, or t
  misc_feature (307)..(307): n is a, c, g, or t
  misc_feature (332)..(332): n is a, c, g, or t
  misc_feature (350)..(350): n is a, c, g, or t
  misc_feature (449)..(449): n is a, c, g, or t
  misc_feature (481)..(481): n is a, c, g, or t
  Coding DNA Sequence Number=SeqID_5557
acccgccatagtccgcggagaacgggcgntgcggtgccacacgctgacggcaggaccaacaccaccccacaccgcacgcggcccgacccaccatgtgtgagaagagtctatctcgcacaccctccgcacacagcgctaccgaggcangcagagacgcacgtgagcaggngcccgctgcgactgaatgcatcctcaccactcgcacaagtgacgcgcacacgccacccaactccgatatgatagtggcgccctctcaccgcgcgcacactgcccggctcgaatacgtgcattatactgcatcaccacnaagtcacgtaacacaacctatcttnctacgtcccactctctancgcgcgtcgacacagcagcgtctcctacacatctcaccacatacactcccacacccctaggatgacaccccacgcaacgcgcacacgcgccggatgcgncgctgcacgtctcagcggacacggcgcgcgcngtgtggctggcgacgtcgtgatgcgtgggtgacctcgtcgtgcgtatagagcaattgagatcgagtgtgtgtctgtcgcggcgctgtccgactcgcgcactgactctgcgctgat

SEQ ID NO: 15337 - DNA, 414 bp, Glycine max
  Coding DNA Sequence Number=SeqID_5558
acttttcagttagacaccgccggcactaacacttgcaccatgtctgttagaacaaccaaaatgacctaccgcaccagcagcgctgccccccgctccggcggcttcagcagcttctcgtacagcggcgcccccatggcgagtagagccagcaccgcttttttcaacctggggtccagctattgaagagccttcaagttcgggagcggcttcaggagcggtttttggggcccaggtgtgggatctgccggaacacataggtcaggggaaaccggagtttctgggacccttaaacttgggaatcgacctttctttcacaaggtggaacccggggaaggggcgatacagactttttaaaccaagttggcccttttattggaaggggcggttcccgggcaccaaacacaaatgttggac

SEQ ID NO: 15338 - DNA, 351 bp, Glycine max
  Coding DNA Sequence Number=SeqID_5559
ttttgcttgtgaataggaatataacaagaatccccacattgtcggccaggtctgttaccctatgggctgtgctgagtagcgtcaggttggtgacaaaagggttgggaaaacgaaggttgaagagagtttggtgtttgtgagtgaaatgattaatgagaatggagatttggatggaggaagatgagggtgtggggtccgagtgtgtcacaaatgtcataccttttatagtgctagtttagattttatgcaagttaatgggggttgtcagtggtcgcggatgagttaaagggttgtcaaaatcaacgcaagcatggagaaaaatcagagagaatcgtcccatgcgaggcgagg

SEQ ID NO: 15339 - DNA, 570 bp, Glycine max
  misc_feature (40)..(40): n is a, c, g, or t
  misc_feature (356)..(356): n is a, c, g, or t
  Coding DNA Sequence Number=SeqID_5560
gacttatccggcgtgatacctatgtgcgctgaacagttantgtgaaacagcacccgcccaccaccaatcacataaccatatgtgctctaggactgtgcacacgagaacacagaatcccgcacactaagataccgaacactgtgccaatagaatgatgtaagaatagtgtttctgtatgtacagacgccgtatttcttgccgcggcactgcccatataagagatccacctagtaccggaagctatcgagatgtgtagcgctccaccgccagtccccgccctccggccgagtgtggcaagagaaaacataagaacggcaaacagcgcaaccgaagcacacatgagacacacctatagngccgtcagtcggtgtgtagaactaataatgagctacagaccgcgcacccgtactatctgcgatcacatggaagtagctgctacgctgcgcgagaatgtcgatggcgcgtgcccttcctgcctcgcgcgatctactcacctgcagttgctcgccgcacgctctcaatactactggacatatacacatgtatgtcgtgaagcacatcaaccggagt

SEQ ID NO: 15340 - DNA, 584 bp, Glycine max
  Coding DNA Sequence Number=SeqID_5561
gcagcggtcctattcatctgttaatattgcagactcaactgtcaacttctgcaccatctcattcctcatctcctacgccctccgtccttcactatactcataatatcacgcttccatcacgactcaccccatacactctactgtcggctagaagtttccgtagtctctgacgactatgtatgacagcatcaatcaccgcactccctgttcggcgcacactggtagtagtcattatgctacaaccgcatgacaacataactaatcagacaaagagagagaataacgatcaacgacaccacacataaactcgcgctgcgcatggtgccgtcggtcgtgtcggagaagtgcagagccaacgagtgggcacaacacgacgaccgagaggcgcgcgtggtcgatatcctgtcttttctatatgcagcgtacatatatgatataaagtcgtagtaagacttcagcacccactcctcatacgcacttcatcactatcatcttatctacaaacactactactgcagcgcgccgcacggagatgcgcgcgcgactactatattagtcgagattataggtactgcgccacctga

SEQ ID NO: 15341 - DNA, 539 bp, Glycine max
  Coding DNA Sequence Number=SeqID_5562
aattctccttccctattcatgatgtgctctccattgaccatgaaggtttcgccatcctgaatgctgcaaccactaaatccacttcccgtctcagcgaaaccccttcctattacaagccctacaccaaaactaaagccgatcccgttaaccaaggcttaacggagatcttggatcgcatgggtgctgccagtagcaaggctcaaggactaaagcaagtgataacaaatcatataaagtttacaacaagtggtgataatagattatatataaaagcagaagagaatagagtatatgggattctcaaagtgggaaagaagaacttgttttacagagactcaagaggaactgtaaaggaacttcaacctctgtgtgtattggacttttatgtgcatgaatcttgtcaaagaagtggtctcggaaaacagatttttgagatgatgttggaaaaagagaatattgatcctagtaaaatagcttatgatcgtccttctccgaaacttattggcttcttgaagaaacactacggacttgtcagctat

SEQ ID NO: 15342 - DNA, 524 bp, Glycine max
  misc_feature (68)..(68): n is a, c, g, or t
  misc_feature (94)..(94): n is a, c, g, or t
  misc_feature (239)..(239): n is a, c, g, or t
  misc_feature (241)..(241): n is a, c, g, or t
  misc_feature (283)..(283): n is a, c, g, or t
  misc_feature (297)..(298): n is a, c, g, or t
  misc_feature (313)..(313): n is a, c, g, or t
  misc_feature (360)..(360): n is a, c, g, or t
  misc_feature (378)..(378): n is a, c, g, or t
  misc_feature (392)..(392): n is a, c, g, or t
  misc_feature (430)..(431): n is a, c, g, or t
  misc_feature (434)..(434): n is a, c, g, or t
  misc_feature (438)..(438): n is a, c, g, or t
  misc_feature (440)..(441): n is a, c, g, or t
  misc_feature (443)..(443): n is a, c, g, or t
  misc_feature (464)..(464): n is a, c, g, or t
  misc_feature (480)..(480): n is a, c, g, or t
  Coding DNA Sequence Number=SeqID_5563
acctccacaaatcacaatcattgtgtgtgagggagggtggataaatacatattatcattgaacgtctnttcttatacacctagctctagatatnggtagagagagagcgagagcgcgtagtcagggtgtcaagattgtctgtgtttatttattatataatagtgttcagtactggtgggcgtcgtgtctgggcacatgcggacagcacacaccgactggaccgacgagacacacaactncncaacactatagtaaattgtggatgttgtgggtggagcttctntggcgggggcgggnnggtgtgtaattaatntatgtatttgatattgggtggggtgtgggcgacgcggcggcagcaanagcgtggggcagaggagntaacgcagctggcnagagcgaaaacaaaacaacaactaaaaatcccctccgnntgncgananntnggggtgtgaggtagagacttncccttattttaattgntgtaatttggagtgggtgggggcccacacagataagagagaata

SEQ ID NO: 15343 - DNA, 529 bp, Glycine max
  misc_feature (504)..(504): n is a, c, g, or t
  Coding DNA Sequence Number=SeqID_5564
attaacacatcttctcaaatgcaagaaatcaacgaacttaaaaatcttgtcatccaaagtcttgaaggcaacggtgtcttgggtcaaattagagctcagatcagagcctctgtcttcaaaatcatcgaaatgcaagagactactgctaaaaagaactctggtttcttctgggagaatcctctttgccaaactatctatgataataaagaaggtcaattggctttggaattaatcaatgactttttggagtttttcaagatggactatacttctagtgtttttacacatgaatccaatcttaaagatgcctcaaaaagagatgatttacaacgcaaattaggtctcaagactgagaataatagacccgttttattccaaattatcagtgctttagctgctcaaacttcttctgataaagaaaatcaatctatcagttcgactaagcctaatacaacaacttcatcagcagctcctgctaaaaatttaagtgctggtgctcaaganactggtgctggcaaaacttcttttg

SEQ ID NO: 15344 - DNA, 297 bp, Glycine max
  Coding DNA Sequence Number=SeqID_5565
ttcttttgctcaaacgaacccaaagaacttatgtcagccttatgcccaattgggaaaaaaccatggcactggcaaaattgccaaaatatagcgctacagccaggccccaacaaaaaaagccgaatctgacaacaccatggactggacacaaagagggtaacatccctggaataaacggaacaaccccagagtgccccacacataaaagaccccctccccccccaaaataaacccaaacaagcgcgacaaataacccccgacagaacctgaaaagcatgggccaccacgcaaccagga

SEQ ID NO: 15345 - DNA, 486 bp, Glycine max
  misc_feature (44)..(44): n is a, c, g, or t
  misc_feature (74)..(74): n is a, c, g, or t
  misc_feature (150)..(150): n is a, c, g, or t
  misc_feature (164)..(164): n is a, c, g, or t
  misc_feature (170)..(170): n is a, c, g, or t
  misc_feature (174)..(174): n is a, c, g, or t
  misc_feature (181)..(181): n is a, c, g, or t
  misc_feature (185)..(185): n is a, c, g, or t
  misc_feature (188)..(188): n is a, c, g, or t
  misc_feature (208)..(208): n is a, c, g, or t
  misc_feature (239)..(239): n is a, c, g, or t
  misc_feature (256)..(256): n is a, c, g, or t
  misc_feature (258)..(258): n is a, c, g, or t
  misc_feature (342)..(342): n is a, c, g, or t
  misc_feature (371)..(371): n is a, c, g, or t
  misc_feature (374)..(374): n is a, c, g, or t
  misc_feature (448)..(448): n is a, c, g, or t
  Coding DNA Sequence Number=SeqID_5566
atatgacatgacgtgagtagtgagtgagagacatacgcagcgtnacacactgtatatagtacagcgagagtgancggagcacgcacgacggctactgtgaagacgagcatctgtactgtctcatgattgtacacgacgcgctgggcagantgacggacctgcgntgaganatcncacaganctancgngtgctagctgtcgtgtcgcngactatcgacgtacggaacgtacagtcgtgnagactggtcgcgctganangtatactatatacacattaatatgctcccagtgctgctatctctctcacgatacgtagatacagtcatactgcggtcatcatantcgagtagtgatgtatagattgtgtgtantcntcaatgtcttcgcgccactgcacgttgctcatgtgtatgtgtgctcttgtcattatgtttgctgtatatctatnatatctctgtcttacttctctctactcttcgtctcttt

SEQ ID NO: 15346 - DNA, 461 bp, Glycine max
  Coding DNA Sequence Number=SeqID_5567
tctgtatgctgcagccgtcttcgtctctgagataacaaaggcacttttagtttaaaaggcatttcaaagagacaaacatgtcgggtgatgaggctgctgctccagttgttgttcctcccgttgctgctgagccagcggctataatcccagaggatatggatttgttgactgcattggagttgactcttaggaaggctcgtgctcatggtggtgttgttcgtggtctccatgagagcgctaagcttatcgagaagcgtgttgctcagctctgtgttttggctgaagactgtaaccagccagattacgtcaagcttgttaaggctctatgtgctgatcacaacatcaacttgcttactgttccaagtgccaagaccctcggcgaatgggctggtctctgcaagattgactctgagggtaatgctagaaaggttgttggatgctcctgtcttgtggtcaaggac

SEQ ID NO: 15347 - DNA, 497 bp, Glycine max
  misc_feature (169)..(169): n is a, c, g, or t
  misc_feature (354)..(354): n is a, c, g, or t
  misc_feature (360)..(360): n is a, c, g, or t
  Coding DNA Sequence Number=SeqID_5568
gagtcgagtcacatattctgatactatttattatagactaccagatatgttgatcatggtatcaacgtaatatacatccgatacacagcgccgtagtacatctgtggcagtagcgacgcgagtgagaacagagaggcgcgtacagcgagtggagcgcatgacgagagangggagccgatgtgcgagacgatgagagaggcgagacaacacaatatcaatagaagtcgtataaagagacgcatgaactctctgcagctaggtgaaatataataaatgtatcttagacgttgaaatatatttttcatcgcttcgcggcggagcgtactactaccctaccacacgacgcgcgccacncgcgcngcgtcttgtgcgtatgacagaacatcatatgactattaaatcatgacattggaagtagcgagacaacatgagggagggatcctcggcctcagttctgggatacgtaccgcccgtcgtgtgcgcatctattcgttaaa

SEQ ID NO: 15348 - DNA, 145 bp, Glycine max
  Coding DNA Sequence Number=SeqID_5569
gagtagtcgtctaaccaggctggatcgttccatcacaacattctgactggaataaccgtgtcactacccaactaaatcgccatgcactacattcactttttgtcagcagtcgtaaaccctaatatgtccgctccgaacgacctta

SEQ ID NO: 15349 - DNA, 541 bp, Glycine max
  misc_feature (61)..(61): n is a, c, g, or t
  misc_feature (64)..(64): n is a, c, g, or t
  misc_feature (110)..(110): n is a, c, g, or t
  misc_feature (162)..(162): n is a, c, g, or t
  misc_feature (209)..(209): n is a, c, g, or t
  misc_feature (350)..(350): n is a, c, g, or t
  misc_feature (361)..(361): n is a, c, g, or t
  misc_feature (420)..(420): n is a, c, g, or t
  misc_feature (491)..(491): n is a, c, g, or t
  Coding DNA Sequence Number=SeqID_5570
gatatgacgcagtacagattacgatagagtagctacgcacgcgagtcggatcgcgagagtntgntattgataatcactatctgatctatcacacagcacatgtatgcagnttgcagatgttagtgagtgtgagttgtagtgagagcacacgacgagatgacngagtatgatgtagtcatctaagaagatcagctcatgcatatatctgntgaagatatatctctcgtactgagagcttatctatagtcgccatctcgcaacgcacacgactcggccgagacgatatgtactagcatcgtgagtcatctataataataagtagctgatacgacgagccgagcgcgaagtcntacatctactnacatatacacacagcacatagacgtacagtaaacagacacagatacagcgcattcactntatcactcacacacagaagacgtcatactattgatatagtaaatgtatttgatgattatattgttagtgtngtcgtgtgagcgggaatgatgtggtggctagtgctctactcgatgcatct

SEQ ID NO: 15350 - DNA, 412 bp, Glycine max
  Coding DNA Sequence Number=SeqID_5571
agggcggcgtccttctgtcgcctgagcggtggcaagctcgctggatggcgaggacggccatggaccgtgtgaagatctacgaggagaagccggacatcctgcgggccttcgccgtcattgttatctccgcgacggtgaccggccgcagcggagacatcgccgccttatccaaaatccactcggcgaagcagtgggtggcgacgcacatgaaacgcttgtagcctgagaccaaagttaattacatcctcgtcgggtgtgaggttttccactggggcgacaccaacatgatccgcgggctacgacgtgccatgagaacccttgactcagccctcctagccgagggcatatccgacagtaaggctaaccactggctgactctctgatgataatgccgacattgataccaccaaga

SEQ ID NO: 15351 - DNA, 585 bp, Glycine max
  misc_feature (59)..(59): n is a, c, g, or t
  misc_feature (247)..(247): n is a, c, g, or t
  misc_feature (333)..(333): n is a, c, g, or t
  misc_feature (366)..(366): n is a, c, g, or t
  misc_feature (392)..(392): n is a, c, g, or t
  misc_feature (542)..(542): n is a, c, g, or t
  Coding DNA Sequence Number=SeqID_5572
aatcatactgattgcatactccgaaataacatactggctcgtgcatatgccaatgtatnagatgtctgatgctcatgtttactgtagtggcgaatgcgccagcgatacaaagtgtgcatgcgtcatcgctaagtcagcgctctaaacctaggactgagctgtacaagagtgatgtgtgatgtagaagtatgatggtgacatataaacagatgacacatctcttacgatgcgagagcatactgatgangactcagcgactcagaaggcatggtggcgggcggagcagtgaggctcatcctagcgactcggtagagtacgcatctaccgatgctntaactcaatgattgacaaacatgcgaataaggnagacagcaagaggagatatgtgggtnctgcatcaggtgttacactttcacactctgtacgtgtggtgtgtcttctatttacgcacgtattgctccgtcttcctcacactatcacaactctcgcgtgagcgtgttcctggtactctctctcataatagcaatcagtataaagagtgnggaactggacagcatacgtaaactagcgccgaagcagcactgc

SEQ ID NO: 15352 - DNA, 456 bp, Glycine max
  Coding DNA Sequence Number=SeqID_5573
tcggatcggcctcgccgcagacgagccagcgcggggcgggcccaaaccaacccctcccacgatggtgctgcaggacgacaaccacctgctccccccgccggcggggggggagcagaaaaaccaaaagaagaagcgcctcctcccgccccccccctccttcttctttgacggcaggtaagggggctgcttcatcaaaaactactttgttcatccacccacccacggtcgtggtgtgggcccccggccgccaaacggtctcccacccgccaaggggggggaaggcccggaccgaggggggttcctccttccgcccgaagggccaaaaaaaggtaaagtattaaaaaaaggcagccgttgttgaattctttttctgttgtggtggtgttagtctgaaattttgtcaagttaattgaatccatctttggttatttgatatcttgcctagctcgagcaata

SEQ ID NO: 15353 - DNA, 588 bp, Glycine max
  misc_feature (49)..(49): n is a, c, g, or t
  misc_feature (63)..(63): n is a, c, g, or t
  misc_feature (80)..(80): n is a, c, g, or t
  misc_feature (117)..(117): n is a, c, g, or t
  misc_feature (136)..(136): n is a, c, g, or t
  misc_feature (138)..(138): n is a, c, g, or t
  misc_feature (156)..(156): n is a, c, g, or t
  misc_feature (161)..(161): n is a, c, g, or t
  misc_feature (170)..(170): n is a, c, g, or t
  misc_feature (182)..(182): n is a, c, g, or t
  misc_feature (188)..(188): n is a, c, g, or t
  misc_feature (236)..(236): n is a, c, g, or t
  misc_feature (252)..(252): n is a, c, g, or t
  misc_feature (260)..(260): n is a, c, g, or t
  misc_feature (273)..(273): n is a, c, g, or t
  misc_feature (279)..(279): n is a, c, g, or t
  misc_feature (281)..(281): n is a, c, g, or t
  misc_feature (295)..(295): n is a, c, g, or t
  misc_feature (329)..(329): n is a, c, g, or t
  misc_feature (356)..(356): n is a, c, g, or t
  misc_feature (388)..(388): n is a, c, g, or t
  misc_feature (394)..(394): n is a, c, g, or t
  misc_feature (417)..(417): n is a, c, g, or t
  misc_feature (445)..(445): n is a, c, g, or t
  misc_feature (485)..(485): n is a, c, g, or t
  misc_feature (507)..(507): n is a, c, g, or t
  misc_feature (514)..(515): n is a, c, g, or t
  misc_feature (550)..(550): n is a, c, g, or t
  Coding DNA Sequence Number=SeqID_5574
tatggtagaggacaacaagcacgcgagcgtggtcgtccgtctctcacanacctcgtctgagangtcgacccaactccacnacacaccatatgctcgccatgacatagtatgaaagcnagcgcactacgcagagtgncntatcgccacctcactcgngatgntatcacacntgccacaccaancaaatntgatatgcacgacgacgagcacactcataatcgagacggacaacgaanatccagcgcatggcgntcagcgcntatcaagagaccnatacgngnaagtgagcagtccnaggatcaacacgcgactcattgcgacacatcgcntgcgatcgttagtgcgtctccgaagcntagagacacgcgccagagagccacgcaagagntccgcnacaaacgcgcgaatagctgtaanagaagatagtatacagtatatgagcgtntgtagcactggtgtacgtctacgtaagtatcgcgtcgtgntcacttcgatcgacgatcacgnccgaggnngcggtgttacagatacactagttacctctcctatntacgcttaaataagacaggagtactagtacaagtctgt

SEQ ID NO: 15354 - DNA, 196 bp, Glycine max
  Coding DNA Sequence Number=SeqID_5575
acctccacctctatgaataggctttccgactcctcctcctattccaatatccactagcctctccaacactctttcaaggactgcgatttctgctacacctactacatctccactcaactctatactatcagcctctacacccatacgctgagcgaagtgcgatataatcataatcttcgcactaacattcagcata

SEQ ID NO: 15355 - DNA, 584 bp, Glycine max
  misc_feature (29)..(29): n is a, c, g, or t
  misc_feature (131)..(131): n is a, c, g, or t
  misc_feature (156)..(156): n is a, c, g, or t
  misc_feature (193)..(193): n is a, c, g, or t
  misc_feature (371)..(371): n is a, c, g, or t
  misc_feature (457)..(457): n is a, c, g, or t
  misc_feature (542)..(542): n is a, c, g, or t
  Coding DNA Sequence Number=SeqID_5576
gtgttcaaagccatatacctactacaatngcaacgtatgatgcacagcgtaggctatacgcgtgtgaggttgcttgccactctcttcatcgtgtacgcaccacttagcattacgctatatagttcgcacgnccgccgcgcgcctctgtacgacgtnacatctcatcgcttcctgccgtgcgctgcagagctangatgcataattatgaatgattgaacagcaacgcgtcatatcctactcgcgcatggctgtcgtcgggcgccgcttctactctgtctctcgagggcacgtatatatgtatctatactctatatacggccgctgccctaccctcgcgtcttcttcctctatcatagtaacggtacgagtangtgcttatatactgcatcatctctccttccctgtcgtcttctcttggtaggaggatagataagacttaccgtcacctctcgtatantgagcgttttcggtgcgctcttcactgcgagatgagaggtacgctctatgcttctatatatatctttctacgtgctcgtagtatnacggtggcggtgtagagcgacggcgcgtcagatatataatga

SEQ ID NO: 15356 - DNA, 246 bp, Glycine max
  Coding DNA Sequence Number=SeqID_5577
tacgtggagtcctgttatctagatgccagatcaagtcggacaaagcttgcgagagccttgttcaatgtacaatgatcatctctgcagctgttatcatagtattcccgcatgattgccacactctcaacttctatgaagcatgtctcctccattttctctcagatggtgctgcaggatttcaatatctccatagatcatcaggatcagatgaacaatgagtcccagataaggcacctcaggttcatt

SEQ ID NO: 15357 - DNA, 558 bp, Glycine max
  misc_feature (392)..(392): n is a, c, g, or t
  Coding DNA Sequence Number=SeqID_5578
aatcgcggccgtgggacacttcaggagcactgatgcgtgcgtacaccccctcaactggatctattagcaagtaagaactctcagttgaattccgagttatctgagctatcggagtcttacggcgctaataacactcaagacacgaggatgagagggagtaacaccaacaaccgacatacgctcgacgtgggcgccgcgcattatggtgcttacctgcagcaccacaatcctcctgagaagttccgcgtgattcagactaactccatcttaatctttctcccatcctcaccactcccctctatctcttgatcgtactatatcggatgtccaactacagttctgcttataaccacttgatcacctgttctctcgtcatactgacaaaagctatntcgcataccgcctcgttctttacggaccactggagtcgtataccatactcactctgatgccttgacatcttgtatgttcttataactgacatcatgacaatatacctatataatacacgcttcactgttctttttctgtgcgcccatatcgctacgtgcttgtaga

SEQ ID NO: 15358 - DNA, 558 bp, Glycine max
  misc_feature (72)..(72): n is a, c, g, or t
  misc_feature (93)..(93): n is a, c, g, or t
  misc_feature (171)..(171): n is a, c, g, or t
  misc_feature (182)..(182): n is a, c, g, or t
  misc_feature (184)..(184): n is a, c, g, or t
  misc_feature (187)..(187): n is a, c, g, or t
  misc_feature (238)..(238): n is a, c, g, or t
  misc_feature (253)..(253): n is a, c, g, or t
  misc_feature (258)..(258): n is a, c, g, or t
  misc_feature (275)..(275): n is a, c, g, or t
  misc_feature (319)..(319): n is a, c, g, or t
  misc_feature (344)..(344): n is a, c, g, or t
  misc_feature (376)..(376): n is a, c, g, or t
  misc_feature (382)..(382): n is a, c, g, or t
  misc_feature (395)..(395): n is a, c, g, or t
  misc_feature (409)..(409): n is a, c, g, or t
  misc_feature (411)..(411): n is a, c, g, or t
  misc_feature (418)..(418): n is a, c, g, or t
  misc_feature (481)..(481): n is a, c, g, or t
  misc_feature (507)..(507): n is a, c, g, or t
  misc_feature (517)..(517): n is a, c, g, or t
  misc_feature (525)..(526): n is a, c, g, or t
  misc_feature (531)..(531): n is a, c, g, or t
  Coding DNA Sequence Number=SeqID_5579
gattgtgaaataggactcgcagtgcgggaggtagtacactactataggatctaacgccgtagagagcagtgnctcacgtacggatgacatacnatgaccatgcgtacatgcgctgagcttcccgactgtactgtatcgcccagcacgcgtttgtggcgcttctagtattcntatctcatctncnccntcatcttactatcttagatctccactgcagtgactaggcaccgcggagaangatcgctgatggtanctgcngtgtacgagcgattccnatatacagatgatgtcgagtcgtgctctctactacgtcattttnctccttcccttatacatgtcgtgcngctagtgcgctacgctgacggctcgatgcacntatacngctacgacgcctncgcgtctgcttctngntctactncgactcctcgtatgagcgtctaccgtgcactccgaccgacgccgtcactcgatcatatcgaancaccatccaactactcgataccgcancattatcttnctatcatnncactnactcaccagccctgatgcgatgtcatg

SEQ ID NO: 15359 - DNA, 584 bp, Glycine max
  misc_feature (394)..(394): n is a, c, g, or t
  misc_feature (558)..(558): n is a, c, g, or t
  Coding DNA Sequence Number=SeqID_5580
aacactcaacggtattccatagctgtcctccatcatcgcgcgacatccacccccaaccacatctcagggcacttgcaacctatggaatgcgacatcgtaacatagatatgccaaagattacatatttaaatgcatgataatcacgcgtctatcgctgtcaaccctagacccccgcctgacttagatctcggtccaatacgcctactttgtgttggagagttatagaatatgtacacatagaagtatactaaacgaggtcattcctcgcacacccatctctagctcgagccgcaactcataaatattttatagctagagtaatgcactactttacagatatcgccgcgacccacgagctcacattcagtcttatcatatattacatatctgtacnaatatcgtatcatctggacatgatgtttatatatctctctaatcacatgtcttgtatgtataccaatatatattgaatgtttttgtgattatctgcgaaatagaatataaacaggatgagaatagacgcgctgatacatcacacaacgtacgcaacaactctancagcgacgacgtcaacattcacacac

SEQ ID NO: 15360 - DNA, 598 bp, Glycine max
  misc_feature (112)..(112): n is a, c, g, or t
  misc_feature (158)..(158): n is a, c, g, or t
  misc_feature (205)..(205): n is a, c, g, or t
  misc_feature (231)..(231): n is a, c, g, or t
  misc_feature (296)..(296): n is a, c, g, or t
  misc_feature (322)..(322): n is a, c, g, or t
  misc_feature (327)..(327): n is a, c, g, or t
  misc_feature (407)..(407): n is a, c, g, or t
  misc_feature (418)..(418): n is a, c, g, or t
  misc_feature (468)..(468): n is a, c, g, or t
  misc_feature (507)..(507): n is a, c, g, or t
  misc_feature (523)..(523): n is a, c, g, or t
  misc_feature (527)..(527): n is a, c, g, or t
  misc_feature (562)..(562): n is a, c, g, or t
  misc_feature (566)..(566): n is a, c, g, or t
  Coding DNA Sequence Number=SeqID_5581
gatagctactgtatcacgcgatattaagtatacctatctgtcttcaaaagcggctccacgtatgccacagtctacgacatcatgctctcccaacgtatgcttggcgcattcncattcattgtgctagctgtcttgctaccatcactgctcctctactngtattgtgagatgctagagtgaatgtgtgagcgtgcataatccaggntacgtcgctgctgatgtgccgatagncagtgtgcgacgctgtgtgatgtatattatatagttatagcgctctatcatgtgcgcgcgtgctntgtacgatccgcacttcagtcagtancgctngtacgcatatatctcttcaccgctcatgtctgtcggtgagagtgagcatgtatactacacgcggtctatcactccctcancactactcaancagtctggcagaagataggatggagagacagtgcgcgtggtgagtgatangtgcgcgtgacgcgtagagtggctggtgtcggtgcgatnagatagtgatataatntggntgtatgatgagtgaggcgatatgtgtgtcgatgtngtantcgcagtacttcattcatgagagtgtgtcgat

SEQ ID NO: 15361 - DNA, 480 bp, Glycine max
  misc_feature (272)..(272): n is a, c, g, or t
  misc_feature (371)..(371): n is a, c, g, or t
  misc_feature (374)..(374): n is a, c, g, or t
  misc_feature (443)..(443): n is a, c, g, or t
  Coding DNA Sequence Number=SeqID_5582
cagaatatattctgtatcaggtattatgttatttgtagtgtatagggtatatatacgtatctaggttgatccatcatctcttactacatctttcatctcgtgcaacacacacatactataaaacgaacacgtccgcccgagagcagacatcgaagctacgagcgcgctcggggcgaccagaataccctatacgacggcgaaaacaattagaaaatagaagagggagcgtgagaaggagggaacgacgcgccgggcgccactgggtgttgcgntgtgtcccagtctgtatgactgctctcctccactcgtggctatgcttctcccttctgcacttacgcccactcacgtacgcgactacacctacaatatantanccgcccacgacccccgcgagctcccccatcatcgcccgtctccgtccggcacacacccaccaggaaaanaaataattaaaattaacaaataacagcatcacctctc

SEQ ID NO: 15362 - DNA, 437 bp, Glycine max
  Coding DNA Sequence Number=SeqID_5583
gaggaaactttctattgcgcgtgtcccattctcttctccatacctctcttcagtctaaaagatggaggtcaagttgtggaacgataagcgtgagagagaaatgtacgagaacttcgctgagctctacgctatcatcaaagccaccgagaagctcgagaaggcttacatccgtgacctcatctccccatccgaatacgaaaccgagtgtcagaagctcatcgtccacttcaagacgctctccgccacgctcaaggacttggtccctaacatcgagcggttcgccgagacgtacaagatggactgctcggctgctgtgtaccgtcttgtgacctctggcgtcccggctaccgtggagcatagggctgctgctatggcgtctacttcgagctctgcttccgttgttgccgagtgtgttcagaacttcatcacttcaatgg

SEQ ID NO: 15363 - DNA, 577 bp, Glycine max
  misc_feature (79)..(79): n is a, c, g, or t
  misc_feature (122)..(122): n is a, c, g, or t
  misc_feature (185)..(185): n is a, c, g, or t
  misc_feature (306)..(306): n is a, c, g, or t
  misc_feature (325)..(325): n is a, c, g, or t
  misc_feature (356)..(356): n is a, c, g, or t
  misc_feature (359)..(359): n is a, c, g, or t
  misc_feature (377)..(377): n is a, c, g, or t
  misc_feature (384)..(384): n is a, c, g, or t
  misc_feature (406)..(407): n is a, c, g, or t
  misc_feature (445)..(446): n is a, c, g, or t
  misc_feature (454)..(454): n is a, c, g, or t
  misc_feature (467)..(467): n is a, c, g, or t
  misc_feature (484)..(484): n is a, c, g, or t
  misc_feature (486)..(488): n is a, c, g, or t
  misc_feature (499)..(502): n is a, c, g, or t
  misc_feature (509)..(509): n is a, c, g, or t
  misc_feature (519)..(519): n is a, c, g, or t
  misc_feature (527)..(527): n is a, c, g, or t
  misc_feature (543)..(543): n is a, c, g, or t
  Coding DNA Sequence Number=SeqID_5584
aagtgttattgatgttacggtagacaattttaataatattattatactaatttgtatgtgttacttcttagtacatatntttggtaaatgtcatatgtttgtgaactaatttttgtattgtntctcatctctccttccgtctagcacacagcgacaacatcgtcatatgaactagcatcaatatnttcatgctataggctgtcacacacgagaccgaacaggatagggagcgcgaaggacgataacagtgtgcgagaagttgcggatgttcacatcacgagatagattatatagtatagatatacntagatgtcagtatatgagnggctactgcacgtcttagtggagggagcggnggntgtgggcgtgggtgaatngctgcanagcattgatatgtatcgtgagnnatagaagagagcaaatagtgtttacgagcgtgacctannaattgtanattatacatcatnactcacacaataatatnannngagagtggaannnnaaccacnccccccaccnctcttctncactctctcagcgcgngttagacggtcagtgtagtctgtggcctatgagg

SEQ ID NO: 15364 - DNA, 491 bp, Glycine max
  misc_feature (374)..(374): n is a, c, g, or t
  misc_feature (394)..(394): n is a, c, g, or t
  Coding DNA Sequence Number=SeqID_5585
gatggtgtagtatttgacctgtgcagagatgtgtctgacagtttgtattcgcggtggcatacgagtcgcgagcgcgcttagtatcttatgcagcattcacaaccacaccgcgccaaccgccagaccacgctatacagacggagacctgcactagcgcgaaatcaagaaaagcacaagacaccgagacactgtaagcctgcgcacacacaacggagacggacgccggacgctcaggtgccagacgcgaggcgcgaactcactgcatcagtaccgatcaggaggagggtaagcacaacgcatcggacgacacacaagggatcgcaaagcaaaatctacatcacaacaatcaaccatcataactacgaagatatctnccatcgaacaccaccccaancccccaccggcgagcgagttttgtgtgtgttgtcgtgtgggttctatgcgtcgctcgtcctttgtacgcgggctgtgcgtcgcatgagtattaatta

SEQ ID NO: 15365 - DNA, 443 bp, Glycine max
  misc_feature (319)..(319): n is a, c, g, or t
  Coding DNA Sequence Number=SeqID_5586
acaaatctcataccactctctacaacaacaacatcaatctaacacgtctaatcgattttgtcgcaatggaaaccaccggaaaagtgaagaaggctttcggaggaaggaaagcgggtggccccaagaccaaatccgtctcgaaatcgatcaaagccggtctccagtttccggtggggagaatcactcgtttcctgaagaagggacggtacgcacagaggctcggcggtggagctccggtttacatggccgccgttctcgagtacctcgccgcagaagttctggagcttgctggtaacgctgcgagagacaacaagaagtngagaatcatcccgaggcatcttctgttggcgattaggaacgatgaagagttggggaaacttctcagtggagttacgatcgctcacggtggtgtcttgccaaacattaactctgttcttttgcct

SEQ ID NO: 15366 - DNA, 515 bp, Glycine max
  Coding DNA Sequence Number=SeqID_5587
tttcgtccctggataccatgtgtcaggaggagtagccatgagaccctacggtacctggtacgcaagacaactccgcactactgctaactgggcaaatactggattattttgccaagattatggatttgctgtgatttgggacaacagtggtgctgctttgggtgatgtcgttggtacccttggatggagcatcaacagagacgccccaaataccgtctggacctctctcggatatccccaagcatctccctacgatggaactcaaaacttctactcgacttctgcctatgctggctcagctgctccaggatgcacacctaataccattggtttgtacacctcagccacccctggttctagtggtggtccctgggtaattgattttggttccaataactatctcaatggactcaacagctacaaatatgataattatcccgatatcatgtttggcccttattttgataataattggctcaatgctttgaatgaagccgaagctatcagcccttaaa

SEQ ID NO: 15367 - DNA, 337 bp, Glycine max
  Coding DNA Sequence Number=SeqID_5588
agattcgggtgctttgcatcatcttctccaatggctactccgacacagagcagcgaaaccaaacccttctctgtccttttcgtctgtctgggtaacatttgtcggagcccagcagctgaaggcgtcttcagagatatcgtcaaaaagagaggcctcgactccaaattcatcattgattccgccggaaccatcgattatcacgaggggaatatggcagatccaaggatgagaagtgctgcgaaacggcgtggagttgagataacatcattatctagaccaataaaggcatctgatttcagggagtttgatctcattctcgccatggatgagcagaaca

SEQ ID NO: 15368 - DNA, 493 bp, Glycine max
  misc_feature (27)..(27): n is a, c, g, or t
  misc_feature (173)..(173): n is a, c, g, or t
  misc_feature (241)..(241): n is a, c, g, or t
  misc_feature (302)..(302): n is a, c, g, or t
  misc_feature (306)..(306): n is a, c, g, or t
  misc_feature (347)..(347): n is a, c, g, or t
  misc_feature (410)..(410): n is a, c, g, or t
  misc_feature (427)..(427): n is a, c, g, or t
  misc_feature (448)..(449): n is a, c, g, or t
  misc_feature (455)..(457): n is a, c, g, or t
  Coding DNA Sequence Number=SeqID_5589
gccaggaggtgagtgatgtgcggttgngtgcttcgtccgctcaagctgcccatcggcgtcagtgtgataggtaccggaggagatgaggaggatgatggcgtgtgttagtgtcgccctccatccgtgtgagctggcggtgtgtgccgggtggtatggtgagggtgtgggcgtgntggaggagagagagttggtaggtggaggtgaggagtgtgtgggggtgagagaggaaggagtagagtangtgtgtgaggtaagggtgagagagcctgacgtcgacaaaggggacagggagagtaagcgcnttgngaggaggaggagaagagccaatcgcagttgtataagtgcgnaacataattccaaactaaaacaaggaggggagtagatggagcgccccatgctctgtgattgcncggggtgggtgatgtgncaatgtcagtagtgtagtganngagggnnnggcgtggcacagagtgagcagcaggtataataaggt

SEQ ID NO: 15369 - DNA, 420 bp, Glycine max
  Coding DNA Sequence Number=SeqID_5590
ttcttcttccatgggactcgcacgggccttggcggtgctggttctcatatgctcttccacggcggctcaaggtaaagtagctactctccggccggtcgtatctactcttttttctcctcgagaagcacgcagtaatattaatccaaggcccggctggccggcttgcttgcatgtagctgactcgggtcaatggcccggaacacgtgtgccacgaagccctccgccgccggttgcaccgggcggccccggtatgtttatcaagtgcgcggactgccgctccggtgccactccgacggccggccctgcaggcgttcccggacgtcgacagtgagacgcttgcgcgtgaagcaaaactatgcggcgacctcgctggagttctttgttgctggttctgtgttcccatgtgtttttcgtcatttt

SEQ ID NO: 15370 - DNA, 585 bp, Glycine max
  misc_feature (89)..(89): n is a, c, g, or t
  misc_feature (246)..(246): n is a, c, g, or t
  misc_feature (303)..(303): n is a, c, g, or t
  misc_feature (335)..(335): n is a, c, g, or t
  misc_feature (458)..(458): n is a, c, g, or t
  Coding DNA Sequence Number=SeqID_5591
tatgtattcttcttatccgacgctgcgcgcgaattgagccgttgcccgaaccgccgtctaatagtcataatatgcgcgcagaacgaatnaatcttccctatattcgcttcttgcacacaatgcgcccgcattgtatatattatatcaccgatataacacgtgtgcgcgcgcttaatgtatgctgcacgccgctctattatataatataatatgttaccacaattcttttgcgccgaacacgccgcnacacatgtatacgcgcctcacgaccccgcgccgatagcaacagtcagatatatctanatcgcgtcggcacgacgcacaactgaagtatncggccatatactctagtctcgcggctgttcttataatgcgcgtgtaaaccaggtatcgctgcgtgtatatcgaaatactataccgccacggagcaacggcgcggcgagtacgatacacactanatggtcacgcacagagcagtgtattgtccgatgctatatcatactcgcacatgtacatgcctagatacgtcttcgctgctgtgcacagctgagttacgagtgcacaactgggtgtctggtgcactat

SEQ ID NO: 15371 - DNA, 363 bp, Glycine max
  Coding DNA Sequence Number=SeqID_5592
ctccgacgaggctggttctaaagggctgtgttacctactcttgaagatgcagagatccgaagctagggtattagtctatccattgaacattcactgcatcttgatcattacgcttgtgggaatctgtactctatgattatcccatgctgtggtgacctaacaggattgaagggcggtcacttcctcaggactgtacggataagtgcaaacgcagggtaatgttttctcagtgaatacacggtagatgaaccgtgttgtttacccccaagaaatataaccttccatttacccagtgtttcatccagagaagaactaaggtccccctcctttgaggagctccttaaatccttctgggatgcaaaa

SEQ ID NO: 15372 - DNA, 474 bp, Glycine max
  Coding DNA Sequence Number=SeqID_5593
atagtctaaacacaatcatctggctaaacattttctggtttttccttttaactgtgaattgtttccttgcaatatttgcatctaataacgcactagagctaccattttatctagtcacattcagtttccttgtgaattcggtttatctattcacaggttattgcttgttgaacagtagagttagatataatataagaactattttaagaagactacaaaataagagcatgtctaatgaaagtcttaatcaaacgaaaacatccgttttaatgcataatagtaagagctatatgtcacaaacactttcttcgccaactaccactaaacagcttgatctagttgatcaagcatttcctggttctaatttgcaaacaaagttttcaaattcacaacagcaaatcagcggctctagaatgttgaacaaatcagcagcgtacgatttttcaaccaatttcgactcatcaactaccacaa

SEQ ID NO: 15373 - DNA, 579 bp, Glycine max
  misc_feature (119)..(119): n is a, c, g, or t
  misc_feature (256)..(256): n is a, c, g, or t
  misc_feature (338)..(338): n is a, c, g, or t
  misc_feature (485)..(485): n is a, c, g, or t
  misc_feature (535)..(535): n is a, c, g, or t
  Coding DNA Sequence Number=SeqID_5594
tatctgcgctgggtgtgctggttcagcgtgatgcgcctttatatatagcttgtagagatacagtatggataatagcatacttcgcaaggcgccgagagtggtagagtgtattacggtangtaagtatagctgcgagagccgcggataaatgattcatcgttcttgtataaatagagaacacgagtgtggttatctctcaagttagcccatagctctatacagtaccttataacaggtcatcgcccctctccacagnacaactataaatatatattccgacatcccaagttccgtgacgagctgttattctttgcggagtgcgatatacacaatacctntacatatctctgtctgtgcgagtgtagtggcaactcgcggtcttagtctgtgctctatatactgtacttgttgataccgtggaagatatacgctctgttagtccacagtactactccgcgatctgtgatggcggaaaatgagatcanaatactcgctgccgcgcggccaaattaattttaggtttgtcgacggtttnatatttttctgttatatttgtaatattaagcctgtcgcagacga

SEQ ID NO: 15374 - DNA, 565 bp, Glycine max
  misc_feature (32)..(32): n is a, c, g, or t
  misc_feature (130)..(130): n is a, c, g, or t
  misc_feature (142)..(142): n is a, c, g, or t
  misc_feature (165)..(165): n is a, c, g, or t
  misc_feature (284)..(284): n is a, c, g, or t
  misc_feature (332)..(332): n is a, c, g, or t
  misc_feature (368)..(368): n is a, c, g, or t
  misc_feature (385)..(385): n is a, c, g, or t
  misc_feature (432)..(432): n is a, c, g, or t
  misc_feature (454)..(454): n is a, c, g, or t
  misc_feature (466)..(466): n is a, c, g, or t
  misc_feature (473)..(473): n is a, c, g, or t
  misc_feature (499)..(499): n is a, c, g, or t
  misc_feature (502)..(502): n is a, c, g, or t
  misc_feature (533)..(533): n is a, c, g, or t
  Coding DNA Sequence Number=SeqID_5595
gtgacacgcgcgctagtcgtacgtcgtgcgangttagtatcatacataaccggcgcatactcatatctcctaaatagtatctcgaaatatcatctatcatccacgtaccggtgccacgctgacgagcganacatactatgcnagatgatggaagtgattaccctncacgacgagatgacacaatgtatacacgaacactaaatgtctactgacattatatctacctacccaccgctacatagacgctggttgtcgcggctcatgctatcacatcatcactacgntagcacgattagcgaccacgccagcacactccatatatcgagaagctngcttcgcgctaccaacactgcactccgtcctcgctncacgtctgcgtatactngtcgtgtcccacacacgactcattctacactacagtactattctctncatgcagatcacctgctgatancgtgatcagtanctcgtgntacacgagtacgttagcggcagatantgntgtctgacgcgagtgatatgtagtcgtacangatgctactacctatccctacgtcgcgagtaa

SEQ ID NO: 15375 - DNA, 533 bp, Glycine max
  Coding DNA Sequence Number=SeqID_5596
gatgttgttatattccacgaggtatacattagggaactgaaggatccagtgcataatgtctcaccaacatctgtatttagctatcctcccaatagatagaaacagttcgagtagtacaacgcgagaggtagcagtgcgagatagcattagctgctgttatgattgtaatatgctgacgtaggcgcggcctaggtaaatatatactaattatatccatgaccgtccgcgtctgtcgcgctagttctcgcttaggtatagttgcgtacctataatgcaataactcttactcgaccgtccaggacgcgatgcagtccattccgtggagtgtcgccgggacgacgccgtcgcaacgacgctcgtcctcatgtcatcaaactacactaagttttctatgcggatctctgatgttcgtttacgtccatctctcctcacagtatctattggtgggagcgagggcaaccacacacgtagacatcatgctcccagctgagaagggggggcggcctctatcgtcctcaatcttattgtcggta

SEQ ID NO: 15376 - DNA, 568 bp, Glycine max
  misc_feature (26)..(26): n is a, c, g, or t
  misc_feature (54)..(54): n is a, c, g, or t
  misc_feature (179)..(179): n is a, c, g, or t
  misc_feature (203)..(203): n is a, c, g, or t
  misc_feature (222)..(222): n is a, c, g, or t
  misc_feature (316)..(316): n is a, c, g, or t
  misc_feature (376)..(376): n is a, c, g, or t
  misc_feature (508)..(508): n is a, c, g, or t
  misc_feature (519)..(519): n is a, c, g, or t
  Coding DNA Sequence Number=SeqID_5597
agaatggcatgctgttggtaatcacncaccccacccccaccgctcgccgcgcgngacgctagccgacggagcgaacacactataccgcactccaatcacacaccgcggagccgctacctcacacatcctccgagcactctcgctcgtctccactgctcatcctcctctctctgcggcgncctgtcgctaccatctcactatcnctcgtcacctcaacatcanactatctaggacgtgtgtgagcacacctaccgcactccaccgccagcgcgcgggccggaggcagatgatccgcctccatccacaatagagcctntgtgggcgatgagctatcccgactcactcacttgctcggctcgtcttgatatcgatgctntgatctgagtgtcgggcctgtgcgcaggtgctgtccgtctaccagctcgacatacggtgtcaacatttctgtgaagcatgtcactgtgttgtagtgttcttgttatcatgcacgaggattagctcgcgcgtnctcgcccgctngctcgtgaactctacgtaccgccgtatgacagcgcgcactctatcgtct

SEQ ID NO: 15377 - DNA, 523 bp, Glycine max
  misc_feature (152)..(152): n is a, c, g, or t
  misc_feature (186)..(186): n is a, c, g, or t
  misc_feature (215)..(215): n is a, c, g, or t
  misc_feature (237)..(237): n is a, c, g, or t
  misc_feature (284)..(284): n is a, c, g, or t
  misc_feature (288)..(288): n is a, c, g, or t
  misc_feature (369)..(369): n is a, c, g, or t
  misc_feature (474)..(474): n is a, c, g, or t
  misc_feature (488)..(488): n is a, c, g, or t
  Coding DNA Sequence Number=SeqID_5598
atctctcgtcgcatgtggtattttaatgtatcatctctcatctcaccgcgcgcgcagagtgtgtgtatagcgcgtcgcgtgcgatcactaagatgctctggtagcagcgaactctgacacgtacgctcgctacgtgctccggctcctcgacncgacacacccacaccacagcccaactctcaccantgccttaagcacaacgcgacacacgacanaggtcattctcacgtatctatnacctctcacgcgacacgactcctctctctgtgcgtagttagtgtctnactnctatcatagatcccatacggctactgcacgagagctacgtacctacgagcgcgcgcgcgcacgcagctgagcagtatgatncatatagtctatcgtgcccttatgaccactatctctctctctctgtgtccctgtgcgctctagtactacgctctgacccttctctcacacaccgcacatcagcancttcgcgccgtacncttcgctggcactgtctaccgtcgatcatgtgata

SEQ ID NO: 15378 - DNA, 291 bp, Glycine max
  Coding DNA Sequence Number=SeqID_5599
gggtgtgtctttttgctctcggtatgtttggcgatgacggggtgtggtactaagagggcccaacattctcttcaatacatcgtattctccaacgatcaccaggaatccgtgcctcctccggccgctgtaaaatgaggcgcgttggctctcctctctgtcatcggtatctcactcgcgattacgtgcagcggacccccccccccagaaaaaaaattgtccagcgcctcaggggcaggccaaggtgtgtctctgggagtgctcaatctggcaagtgtcataccccagatggtg

SEQ ID NO: 15379 - DNA, 344 bp, Glycine max
  Coding DNA Sequence Number=SeqID_5600
gcgagcctcgtcctggacaagtgcatcctctcccgcggacctctccctctccggctcgtctccagcaacatgttcgcaaaggcgctggtactagccgccgcggtctgcggcgcgctctccttccccctcgagtacccgggcgccctgtactcgcagtaccacgcgcaggacgagctgggccagtacaccttcggctactccgggccgggcgccaccaagcacgagaccaagacggcggacggcgtcacccgcggctcgtactcgtacgtcgacgccaacggtcagctgcagacacggacctacacggcggacgacgtccacggattccgcgtggccgctagcga

SEQ ID NO: 15380 - DNA, 566 bp, Glycine max
  misc_feature (190)..(190): n is a, c, g, or t
  misc_feature (226)..(226): n is a, c, g, or t
  Coding DNA Sequence Number=SeqID_5601
acactccggaaacctaattctcgcgcactcacttcttctgttcatatgagcctttcttaactactctcagcatctcctcctacaaatatactccttccttcacaccgcgactttcagcgcaccacacccctctctttctcttttacagtattcttctactctctcccttagtcataatctcctcattatnctctacacttctccatactttacaacacgcaactcngccaccatatatgattctatcatatctctctgctcgcgctcccttctcatatggcttcctctctggtaccacgcccacactgtgtgcggttctcttgttatgtagcacgcctctccccgctacatcgcttgctcctcaacttcgagcgtcgttgtacactatctctcactccacgatattgcccaccgcactcatgacttgacggcatcacatgattcacttatccactcacacgcccctattattatatatcgtgcgctctgttccaatacagtggtgcgcagttatcatcttctctcacatctcacacacacaatgcgtcactgtgcattcactatca

SEQ ID NO: 15381 - DNA, 525 bp, Glycine max
  misc_feature (60)..(60): n is a, c, g, or t
  misc_feature (128)..(128): n is a, c, g, or t
  misc_feature (142)..(142): n is a, c, g, or t
  misc_feature (223)..(223): n is a, c, g, or t
  misc_feature (294)..(294): n is a, c, g, or t
  misc_feature (296)..(296): n is a, c, g, or t
  misc_feature (311)..(311): n is a, c, g, or t
  misc_feature (319)..(319): n is a, c, g, or t
  misc_feature (345)..(345): n is a, c, g, or t
  misc_feature (359)..(359): n is a, c, g, or t
  misc_feature (442)..(442): n is a, c, g, or t
  misc_feature (457)..(458): n is a, c, g, or t
  misc_feature (497)..(497): n is a, c, g, or t
  Coding DNA Sequence Number=SeqID_5602
tcgtgcgttgtgatatgactacagtgtatgcgtcgtactactcgctacatagagcactcncgcacatggcgtgcatcgaactgcacatgtgacgagctatgagtatatgatgtgcgaccgtctgactnagcttctgtctgtnatgtctcgttatctgcacactacacttctcgtcctcgtactgcatctacatgtctctctgtgtagacgtgctagaacgacncgtacgagatgagagtctatacacgcatcaatcgagcgcacaaccgattatctctactatactacatctgngngatggtttatagacntgatttcncagatacacatgctatctatgtgtancatcagataatcantatcactaatgatgctgcgtattcaatcattgatacgtattactctctatgtcgtctcatgaactttacacgactgatgattngatcacgacgcgaanntcatgcgaatatatatgatcacacgacgcagtagccccnaccacacgcagctgcacgatacgcacga

SEQ ID NO: 15382 - DNA, 502 bp, Glycine max
  misc_feature (49)..(53): n is a, c, g, or t
  misc_feature (93)..(93): n is a, c, g, or t
  misc_feature (121)..(121): n is a, c, g, or t
  misc_feature (215)..(215): n is a, c, g, or t
  misc_feature (281)..(281): n is a, c, g, or t
  misc_feature (336)..(336): n is a, c, g, or t
  misc_feature (410)..(410): n is a, c, g, or t
  misc_feature (422)..(422): n is a, c, g, or t
  misc_feature (431)..(431): n is a, c, g, or t
  misc_feature (436)..(436): n is a, c, g, or t
  misc_feature (440)..(441): n is a, c, g, or t
  misc_feature (456)..(456): n is a, c, g, or t
  misc_feature (465)..(465): n is a, c, g, or t
  Coding DNA Sequence Number=SeqID_5603
gattgcgtccagctgtctgctgtgaccagacggaattcgcagggtggannnnntgcggacactgcgcccagtatgaagtggtactatctctcnacaatatcctacaaaaacaaataagtgnatctgctcgtctgcacctcagctttattcagacgactcgatggatctaaaggttgtctgtagcagataattacctccgtaatgagagagaaagngccagagtggcgacccagagtttccgctgataagagccatgaatccgccgtagtgtaatctgttgntgttgtcgcgtctgtgagacgatacagtcgtatatgactgttggacgcaaagagnccagaagactatattgtatgtgtttattgctcctaacattcagtgatatcgtatacgtaccgtactgaattatnagcccaaatctntgttgcatnaaatntcannaatgcgcatgtgtgntgtgtgagnacacacgagagcgactatttgtcgattctgctgttgg

SEQ ID NO: 15383 - DNA, 345 bp, Glycine max
  Coding DNA Sequence Number=SeqID_5604
aaaactatcatcacaatgccaacctaataaataagaaaattaaaaattttaaaaaaataaacaaattgaaaaaatacgaaatggaagagtggaatcctctcagacaaatgcctcgcatttgtcgtcagaattgttaagaatggatcggactcgtcatcattatttgatcatcaccgagaaaaccacaccttcgtatgttcaacaaaatcgatccataaaaagcactatcaatcaaatcaaatacacataagaaaaaagaaagtagaaaaagatgaaaagactaaaaggaattatagagatgaaacagttgcaacgctccctgcgccgtgaattgaaaacccaaaa

SEQ ID NO: 15384 - DNA, 514 bp, Glycine max
  misc_feature (34)..(34): n is a, c, g, or t
  misc_feature (36)..(36): n is a, c, g, or t
  misc_feature (48)..(48): n is a, c, g, or t
  misc_feature (63)..(63): n is a, c, g, or t
  misc_feature (84)..(84): n is a, c, g, or t
  misc_feature (89)..(89): n is a, c, g, or t
  misc_feature (93)..(93): n is a, c, g, or t
  misc_feature (111)..(111): n is a, c, g, or t
  misc_feature (139)..(139): n is a, c, g, or t
  misc_feature (141)..(141): n is a, c, g, or t
  misc_feature (197)..(197): n is a, c, g, or t
  misc_feature (267)..(267): n is a, c, g, or t
  misc_feature (273)..(273): n is a, c, g, or t
  misc_feature (298)..(298): n is a, c, g, or t
  misc_feature (306)..(306): n is a, c, g, or t
  misc_feature (318)..(318): n is a, c, g, or t
  misc_feature (326)..(326): n is a, c, g, or t
  misc_feature (332)..(332): n is a, c, g, or t
  misc_feature (336)..(336): n is a, c, g, or t
  misc_feature (347)..(347): n is a, c, g, or t
  misc_feature (350)..(350): n is a, c, g, or t
  misc_feature (421)..(421): n is a, c, g, or t
  misc_feature (429)..(429): n is a, c, g, or t
  misc_feature (451)..(451): n is a, c, g, or t
  misc_feature (457)..(457): n is a, c, g, or t
  misc_feature (468)..(468): n is a, c, g, or t
  misc_feature (476)..(476): n is a, c, g, or t
  misc_feature (487)..(487): n is a, c, g, or t
  Coding DNA Sequence Number=SeqID_5605
atatgacgtactctgtcacgaagagtaattgtgntntatcaatatacntatatatatagtagnacaacatacacatactagatntatgnactntagtcagccatactattnatatactgacgtaggacgcagccagcantncgtatgatgccgcgcgcatgcgactatgaacatagtactatagtaatctgatctantgacttgtcgacagatgtacgtagagatgtgtggtcacatgcgctatcgttgttgagttgcgactgcgtncttcgntatgctatcgctggcgctgaatgcngactcgcngatatcgcttantctgagcntgatgnagcncgatcttaggncangtatatgctgctacgacgttactgtgtgctactatgaatgatatgatactactaaatggtctactcgatantgatgatnatgaatgaatgatcatatctgntcgtgntttgctgacgncgcagtgnttacaatatancgacgcgcacacgagcagcgatggtga

SEQ ID NO: 15385 - DNA, 417 bp, Glycine max
  Coding DNA Sequence Number=SeqID_5606
catcatacgataaatccagacccttatcaagaccttttcgattctaataaagagaagtatgtgagagatgttcaagaaatcattaattttaaaactgtccaaaatattgcagctttcatatctaaaacaatacgaaaaatagaaaacatcagtgaactaactcctagttacttacctactacctacgatattggtagaaaagctagaaatctttacattaccaacgaaattcagacaaaaattactcacaccggtagccatttctaggaatttagaacccatagtatggtacctgacatagtaacagtagcagagagcattggagaacacattcctcttgatactggtgtgacaactcctgagattacaaagacatgggctcgccggagttactgcgacacctgtggtaagaatgct

SEQ ID NO: 15386 - DNA, 509 bp, Glycine max
  misc_feature (152)..(152): n is a, c, g, or t
  Coding DNA Sequence Number=SeqID_5607
cacgaggctcgtgaaattttcagggtgatagagaaaacctttgaaacatttcaaaatggaatcaaaagtcaggttttgatttttaatttattttttatgagaaaattcgatttagtatcttcatagtgataatatgatcgtatgtttgagtnatctagatagtgtgaagatcgatttttagaaaaaagttcttgaacagaaatttagagtttaatgcgtttagcatctaagtctatgggatatttgacgctctgttttttcaaagtcaattttcccataaaactgatttttcttttcatgaaatttttgctcctgtattgatttgctccaagaatacgatcatagtatcagatgaaagatattgctttcgattttctttttataaaaagtataattttataaatctagttgaaaagtcaaaacctgacggaatcgttattgaaatgtttcagaagttttttctattcctcaataagtgagttaaaattaaactttagattcacattctg

SEQ ID NO: 15387 - DNA, 577 bp, Glycine max
  misc_feature (83)..(83): n is a, c, g, or t
  misc_feature (148)..(148): n is a, c, g, or t
  misc_feature (245)..(245): n is a, c, g, or t
  misc_feature (374)..(374): n is a, c, g, or t
  misc_feature (399)..(399): n is a, c, g, or t
  misc_feature (447)..(447): n is a, c, g, or t
  misc_feature (532)..(532): n is a, c, g, or t
  misc_feature (544)..(544): n is a, c, g, or t
  Coding DNA Sequence Number=SeqID_5608
gaacatatattcacccgtcattctcactctcatagctctacgatcacctcctactcccgataaaccagcatcccgctactatnacatgacgcaccatcagccataccgatgtctctctcatagtctatatcacatatatctctctttncttgatcttctatctgtgtggttatgtgtatgtacctctcacctcatcacacctgcgtactctcctccgcgactcactctcgcttcttcccgctccngcactctcgtcgccacgtgcccggccgcgcaactctatctcacatcataccttcgcaccctgccctatagcactacacaccatcctctcaactcattttaactcgtacactactcactctgaccacatntgtctctgtctcatgtgctctactncgactgtacgctatcagatactctcgcttcactctcgagcgcccaccnacagatatatctctctatgccatagtctctcatgcggagtcatcccatacccatatacaccacaatcacacgcaccaatgtaccnctctgtgcacangcaccagcagtcaacagcccactacgtgagata

SEQ ID NO: 15388 - DNA, 573 bp, Glycine max
  misc_feature (193)..(193): n is a, c, g, or t
  Coding DNA Sequence Number=SeqID_5609
gggcagatgccggaacataacacacgggctgtgatatcggcgttggagggataacgagtcgtcgcaaaactcaggccgcggccatagtgcacccacggatctgtttaaattgatatatttcggctcacgaacgggcgtgctgtcgttcattcgagatcgtccggcgcagaagtaccgacctcctcccaatccncacacacaggatgtgtgacgtcgcggcgacattctactctccacaatctatatacaaaacgactcccgcgcaccgaagactggcgcgggcggggaagcgataatttctataatgttaagcaattcgctaacaccactttgattcggcttgtgctggcgcgtaagataggattggatggcgatataactcattaacggcgcgcggcgtggcgcccatactgacaaacactaatataacgtgcggcgacgacgagaacactcttctaccgcccgcgccccactctctcatgtcggagagactgcctccgcgcgaccgccccgcctcgcggctgggtagtttaggacaaaatcttttacgacagcgtatattactcgcgcggg

SEQ ID NO: 15389 - DNA, 463 bp, Glycine max
  misc_feature (360)..(360): n is a, c, g, or t
  Coding DNA Sequence Number=SeqID_5610
tgaccgtcggttctaactatttttgcacatatactactgatactagctttgttgccatcttctacacctacacaatatataatacagaatactttgatgtgtgatatatgcaatagatctgtgatgtctttctatcgactgtctacataactctatccttcactatcttacagctacgctcttcatgcctctttcaccttttggcatccgtctaatatctgtcggcgcggtgtgggatctcgcagtgagtcccgcacgagcataggacacagcacatataaaaccacgtaagagagaaatgtgatctatagtctatgatgacaataatagatatccgatggcgactctcctctcatgtgntagagagggcagatgcagcacacacttcacactattagctgatacgccgatcgccaacctctcgtcatgggtgatattattactctctcgattactacctaga

SEQ ID NO: 15390 - DNA, 585 bp, Glycine max
  misc_feature (34)..(34): n is a, c, g, or t
  misc_feature (87)..(87): n is a, c, g, or t
  misc_feature (190)..(190): n is a, c, g, or t
  misc_feature (196)..(196): n is a, c, g, or t
  misc_feature (203)..(203): n is a, c, g, or t
  misc_feature (220)..(220): n is a, c, g, or t
  misc_feature (298)..(298): n is a, c, g, or t
  misc_feature (470)..(470): n is a, c, g, or t
  misc_feature (496)..(496): n is a, c, g, or t
  misc_feature (556)..(556): n is a, c, g, or t
  Coding DNA Sequence Number=SeqID_5611
agaaatagcgtctctgtcatgtagtgtagaactnctgagcatcccagtggcgcgtcgtagtgtctctagactctaacagtcggttgntagtactagagtgtctctctatacctacgcatactcatcctcacatctttgtcacacagacgcagcgcagcgagctggaggccagatgttgcgactgcggacntctacncggaggnatgagtggatgcgtcantgtgcgatctgtgtaggcctacgctatatcttgtgtctgtgcgtcgatgtgtgcttctctcgtacacacgcgacgagnggctaaactcgcagcctgctgcgcacgacgaagacgaggagtatccggagctcgtgtggcggacgtcgtgagtgctgctgatcctgtgggcgcgcgctgatcgtgtcgcagatcgtctgttcgcgcagtgtgctgatgtctctggtagttgtgcgtatgatgagacagagangttcttgatcatgcggctgtgctcangctactgcatgggcgactcaccgcgacgtgctctctgacaggacgcggcacgcggagtgntactacgtgcgtcatccatcggagtacat

SEQ ID NO: 15391 - DNA, 397 bp, Glycine max
  Coding DNA Sequence Number=SeqID_5612
aaatattgaataaacgctcggccgaaaagagaatattagaaatggggttgtgtttcaaaattttgggcgtggaaggacccccaaaaggttaaaaagggaattaggggaaacttgaagcccaaaaagtaacccagggacttggatgggccgtgccttccttaaccctttttggaggaggggtccaagagtttgaccggccaggaattttaccccccaattcaaaactacttgcctgggcttaatttttaactgggtttgattcggccaacaaacaacattgttttgggctctttcattacctttcaaataatcgggaaagtccttaaaataaggcaatccccgaatttaggcacacaaaattgggagtgaaaaaaattgtagaggaaatcagacttaa

SEQ ID NO: 15392 - DNA, 468 bp, Glycine max
  Coding DNA Sequence Number=SeqID_5613
tgttccaatgcccatgcaccaagatcctatggctgctgctgaaaaacaaattgtaaacttgtaaagcctctgtaaacaccctgaagaatatctttcttatgatgaaaattgaagtgattccacattttattctttgtcaagatcactaggttgtactgttggggagatatcaacatggccacgtgccaataatggcattccaggccaagttacatataccggggatatacgagcgatagatgaccttggacgtgaagctgctatctatgatatatcgaaacaaatttaccaaatatgggaacagcgaacagtttcctgcattattgaacacaagcatgatgcaagtgctgtgatttgtgattccgacctaagtacacaactcacgtgagcgacttatactgcactcaaaaaaatggagggcgacagtcacgaaagaagcgcccaacatcatcgaacggagccgggcca

SEQ ID NO: 15393 - DNA, 576 bp, Glycine max
  misc_feature (108)..(108): n is a, c, g, or t
  Coding DNA Sequence Number=SeqID_5614
aaaggctcactactccacacgagacaacacagaaaatcgacacatacacaggacagagaagtacgttaaaaaagagcgagaaagagcaacagacaaaggtgagcgcanagcgctaagtacgggagtcgcacgaagcgtgaccgctcacgcgcggaggggctgctacgtctacagcgcccgccgccccccccgcgggcccgcccgcccgcgcccatcgctcgccctcctcccacagcgtcctaccctcgcgggcaacaggtaccacgcgtaggatcattggattcttcgtgcgagatcgctagcgtactctcgaccacgacaggcaagcgttagcgtaactttatctaagcataagttgtaggatgtggcggcagtcgcgagtgtatatcgggtatcatagatgataatgagaaggagaattcgtgggcagtaacagtgaaggaggcacgcacacgcgctttctgcttcgcgtaatctccctcgcatatgccgcgcgcgatggctaagaggtactggtagcgcgaataccacacacagctcagaacactagagacatgttattacacgttccctgct

SEQ ID NO: 15394 - DNA, 444 bp, Glycine max
  misc_feature (262)..(262): n is a, c, g, or t
  misc_feature (361)..(361): n is a, c, g, or t
  Coding DNA Sequence Number=SeqID_5615
atacagtcgcgagaagagagatatatcagacgcgcgtcatgtgttgccaacatctagtatatgtttaagttattgatgtatatagtaagatgaagatcacatgatacatccagagatgatacagatcggcggcgctagataagaagcagtacagcaggcggcgacttttaatatccataatatatagagaggaaaaggaaacacatgatactatcacgaagaatagattaatataacagtcgatctcaactatatacactcntcataatataaatataaactatagagacgtgagagctgagagatcctaagaacgaagagaataaatcttatatacaagcggatcgaattcatgaacgantcttcctcacaacactcttcactcacactacctagtccgcgctgtactgggcgccgaggggtgcgggcgaattaatatattat

SEQ ID NO: 15395 - DNA, 239 bp, Glycine max
  Coding DNA Sequence Number=SeqID_5616
tcctattctgtgttgcacttttgagggtcacagtccaaacttaccttaacgtttgcactgacagactacaatacactcttcacttatacattccatgactgtggtacacctttgtgcactccttccgtcttgcactacattacatgcttcaaacctttttccaataaaatccgcttgtggcaatctaaaaagttccgggttagccttgggttatgccaaaaaagagattttcccgtgcg

SEQ ID NO: 15396 - DNA, 479 bp, Glycine max
  Coding DNA Sequence Number=SeqID_5617
ggtttacaacgttgcgatcctagctgatgccccatggaatagctctgtcaggggagggaagataattggggttgaaccacgctgatctactgtctagacgtggcgtgatgattcaatgaagccgttgtcttggccggtctaacgatttacgtgttggccagaggtgctttcccatggggaatccttatcgctgcgagaatactctctcaacaagggtggtcagtggtttaggccgccagataccttccccaaatggaggggccgttagaggagctatttaaactgatgcagcaattaatgcaggaaattcaggtgggccattgattgacttgtatggccatgttgttggagtaaacacagctaccttccctaaaaaaaggactggggtgtcatcaggtgtgaactttgcaattcccatcgacacagttgttagaactgtaccatacctcattgtttgcggaaccccctatagtaatagg

SEQ ID NO: 15397 - DNA, 329 bp, Glycine max
  misc_feature (33)..(33): n is a, c, g, or t
  misc_feature (245)..(245): n is a, c, g, or t
  misc_feature (247)..(247): n is a, c, g, or t
  misc_feature (298)..(299): n is a, c, g, or t
  misc_feature (304)..(304): n is a, c, g, or t
  Coding DNA Sequence Number=SeqID_5618
agcggcccggaaatcccaccgagattacactcncctccccctcgtgcgacgtacactcggaaacggagtgcctctgccttgcgcgagataatgtccgttgcgcgttgcttacatgtggagtggcgctgtctgtccgattcgtgttccgcgtcgcgagagaagagaagagaagagaagaatataacgcaatctgccctcgccacggcgcgcgtggcgtgcatactcacctgatgtttgctagggangncgcgccccgcctcagctcgggcggtgggagccttcctcagtcttttgaaannggggntgcgtccgtcgttgttcgttcttcc

SEQ ID NO: 15398 - DNA, 429 bp, Glycine max
  misc_feature (35)..(35): n is a, c, g, or t
  misc_feature (104)..(104): n is a, c, g, or t
  misc_feature (115)..(115): n is a, c, g, or t
  misc_feature (206)..(206): n is a, c, g, or t
  misc_feature (246)..(246): n is a, c, g, or t
  misc_feature (304)..(304): n is a, c, g, or t
  misc_feature (362)..(362): n is a, c, g, or t
  misc_feature (368)..(368): n is a, c, g, or t
  misc_feature (383)..(383): n is a, c, g, or t
  Coding DNA Sequence Number=SeqID_5619
gccatcgaacaatgctgactctagtgacattgctnaagttatagagatcagttgtctttgttgctctgctgtccacatgcgattgtaggctacacatgtcagcnctcattaagancatcaccaacgcgctaggtcttagaactcctttatgcgacctcgcgcagtgacgaatacgtatcgtgagctacataccaccagctagatanctcgactcagctgctgcagcctcaacatcttactttagantccgcgctacactatctatctacacacgaccagcggctatttggtgaggacagtgagntcaatgttctatgtgctatgaagagctctgagatgtcgctcatcgcgcactatagaancgaatnctataagactatagngtactcaactttactggcacatcctgacatgatgagagatgcgcat

SEQ ID NO: 15399 - DNA, 114 bp, Glycine max
  Coding DNA Sequence Number=SeqID_5620
tcggctcgtggctttaagtagcgacagaagggcattatacatattgcatgtatatattcaatgtacattaattggaattcttcaactcttgcggtcgtcgtggcgtctttatac

SEQ ID NO: 15400 - DNA, 352 bp, Glycine max
  misc_feature (250)..(250): n is a, c, g, or t
  misc_feature (307)..(307): n is a, c, g, or t
  misc_feature (322)..(322): n is a, c, g, or t
  Coding DNA Sequence Number=SeqID_5621
ggatgtacatgagctatttcaacgaaaactgcgagaccgaacgctgttgcaagatccaaactttaaatggtgtattcagtgttcatctggcttctttgctcgcccccgccaaaagcgactcatttgcccagattgtggcagtgtaacgtgtgctcaatgtagaaagacttgggaagaccaacacgaaggaatcacttgtgaccaattttccgaatggcaagagatgaacgatccagacaaacaaatgganggagtctctcagcacttacaactgcaccggaatctcttgtccaaagtgcaaatttangtattcacttgcagnaggtggatgcatgcattttacctgtcgcag

SEQ ID NO: 15401 - DNA, 461 bp, Glycine max
  misc_feature (63)..(63): n is a, c, g, or t
  misc_feature (77)..(77): n is a, c, g, or t
  misc_feature (142)..(142): n is a, c, g, or t
  misc_feature (168)..(168): n is a, c, g, or t
  misc_feature (197)..(197): n is a, c, g, or t
  misc_feature (205)..(205): n is a, c, g, or t
  misc_feature (216)..(216): n is a, c, g, or t
  misc_feature (286)..(286): n is a, c, g, or t
  misc_feature (380)..(380): n is a, c, g, or t
  misc_feature (420)..(420): n is a, c, g, or t
  Coding DNA Sequence Number=SeqID_5622
gtcgggctgtcaacagcacatctatactagatctcgagatgacaacagagcagcagcagacancgcagggctacacncagacctcatcacatctatgtgtgattgatatgacgttgacatagatgttagagattgtcagatnctacagatgatgtggattaatgaaanatataatatgccgacaccccgtagagtanacacacanatcacacacanacttcatgaagtaatcgtgcatatacagatatcatacacatagacatattgcgagagagtgtagtggcanattatttatacatctgcttatcatactccgtgcacagtatacttcctctcttcctatcacatacacatcaaccttaccgacattgctgtactangacatcattaagatagatagatatatacacagatagacancaatcaatacatattcgatcatactgtttgtcttatctccc

SEQ ID NO: 15402 - DNA, 204 bp, Glycine max
  Coding DNA Sequence Number=SeqID_5623
gattaaatagatcatgcatagttacatgaaattttcctctcatacggctctctttcgaaggaagcaattcagagagatatctatcaatatatatagataatctaagtaatctaatcgataaaataatatgcactaatattcatatgtttaatgaataattgaatagcgggattttttgagattccatagaatctattccaaatt

SEQ ID NO: 15403 - DNA, 564 bp, Glycine max
  misc_feature (98)..(98): n is a, c, g, or t
  misc_feature (342)..(342): n is a, c, g, or t
  misc_feature (438)..(438): n is a, c, g, or t
  misc_feature (475)..(475): n is a, c, g, or t
  Coding DNA Sequence Number=SeqID_5624
gtgcgcgtgtgactagatctatctctgatctacggagagtatagtagagacgcgccgtcattggcgcagagtcacgtgcgagcgctcgccgcgcgcgncgcggcgccgatggactcgtgctagagagtgtatgcgttgcgcctatctcgcagcgaccagcatgctcatcgcagaagaacgagcgacgagtgcctgactcgaaccagcacggtgcggtactcaccgtgtcaggatgcacatgatccactacccaggaccgcgatgtcgcgcggcgtagagacgtgcgtgcggcgtgcctgtgtacatcagcaggtgtgcccgccgcgcatatgtctagcaccntacagcgatccaccaacgatcctcatctatctgatctaatctctgacgtgttctcccattacatgtcgatggtgtacacgcatatctgcatcagtnctaggctgcgtatcatgtatactctctcacatctctngtagatgtcgtatggcatcatcccctcgacatgcagacgttcatgtgatcatgacctctgaatggcgagaatgccacgagaacccatca

SEQ ID NO: 15404 - DNA, 515 bp, Glycine max
  Coding DNA Sequence Number=SeqID_5625
atgccattagtgtctcttgcacggacgctgggcagggcatagcttcggactttattcgccattcgatttttgatccgttttctcaagaaaatcctgtcaccgagggtactggtcttggactttctatagtcaagcagacggtcactatgtttgatggcgatgtacagatcgagtcgagcaagaagcaaggttctactttcaccgttagactcccatcgactcaattgctgcaccgcccactggatagtgcagcagagtacatcgacactcaatctagtactgctgagttgcctcagctagtgatcagtcttttcaccccaagacggtgggagacgggcgatggagtgagagaccaacggcgacttggattactactagattcgcttacgcaaggtctaagacggtggtttcatatcacggtcattccttgggagattgcaagcatgaattcgcagtcgcggctgcttatcgctttgaaagaagacgaagagagcgcaaaactgacctacggtggc

SEQ ID NO: 15405 - DNA, 462 bp, Glycine max
  misc_feature (28)..(28): n is a, c, g, or t
  misc_feature (33)..(33): n is a, c, g, or t
  misc_feature (61)..(61): n is a, c, g, or t
  misc_feature (70)..(70): n is a, c, g, or t
  misc_feature (74)..(74): n is a, c, g, or t
  misc_feature (109)..(109): n is a, c, g, or t
  misc_feature (183)..(183): n is a, c, g, or t
  misc_feature (187)..(187): n is a, c, g, or t
  misc_feature (255)..(255): n is a, c, g, or t
  misc_feature (261)..(261): n is a, c, g, or t
  misc_feature (292)..(292): n is a, c, g, or t
  misc_feature (307)..(307): n is a, c, g, or t
  misc_feature (394)..(394): n is a, c, g, or t
  misc_feature (411)..(412): n is a, c, g, or t
  misc_feature (427)..(427): n is a, c, g, or t
  Coding DNA Sequence Number=SeqID_5626
agtggtcctgacacgtgcaggtagagtntgtgnatggcgttggcgccagatcctgtcgcanacatcgctntacnggcattgccactacacgagaaatagagaggctganggacgacacagggtgagacatactagatatatatagttgtatgtcagagtatcactagctagatcagctcatcncccngtcactacctctcatcacaacgagacagagcacccgcgggcgatgcgcgcgtgttgttatttttagcnctatcntattcgtgtggtgcgttcggcccacagatgnctagtaaatgagatncaatgatctactgaagcgtgaaggaatagagattggaaaaaacataaacacagcgtgcggacatggagaaagagaaaaggaagatgnggccgcgccaccctacnntatacaaacataacntggagtgagagagacgcgggtcgagaaaaccaaat

SEQ ID NO: 15406 - DNA, 509 bp, Glycine max
  Coding DNA Sequence Number=SeqID_5627
aatgtggcggaatctagctcttctcctctcagaaattttcctctttctccgcgatctaggcgctctgcagcgctctctcaaacaaatactctcagggggtgtggggcgaccgctactatagcggcgatgtgtacatctaccccatataaaacctctgtggctctcgcgccctctaagacttttacctctacacccaatcttgtggggtgaacgtgcagacctattctgggtctccggggaaattttccgcctataccgccgtgctctacccccacaacagcatcttgtgggtatatatctcctctgggggggacctctcacacgggtattatacctctgggggagagaaaatatctcccacctctatttacttctagagactctcttacacggtgaactctcccaccgggtatatctactataacagcttgtgaaagaaagacctatacttttcgcgacaactcttattctgtggtgggagagcgtaccctctcgattgtgactataca

SEQ ID NO: 15407 - DNA, 568 bp, Glycine max
  Coding DNA Sequence Number=SeqID_5628
aagggactgcacaacctatgtctctacgggtttgattgtccctggtggcagctacggcctctgtttgcacggtcaataaaatctgctacttgctactaccactgtgggaatctcgatccaaagcgctttccgtgagatgcctcactattatcacgagaactgcgtcctaggagtctctctgcaggcttcgtgggtggcggaatctggagtcaacgatacgagtcttgaacactgggttgatgagctttgatatctacatcctgactatcacgcaggaagacacaatgcaacacttacccagaacgcacaatgtactacatgtatcgatctcgacctttaccggattaggcataccttgtgctatcggcggcccaatagggacagcgctccaggctcttgagtctcgcctaacactcgcggtgagtggagggagattcaagaggaaagaaaatccttggattgacgaggctgatcagagagatgccctggatcaccttctgaggatagcctgcataaacgacgactatctctcgataatgcccgatgatgctgagactccaagcgcgca

SEQ ID NO: 15408 - DNA, 552 bp, Glycine max
  misc_feature (207)..(207): n is a, c, g, or t
  misc_feature (228)..(228): n is a, c, g, or t
  misc_feature (241)..(241): n is a, c, g, or t
  misc_feature (408)..(408): n is a, c, g, or t
  Coding DNA Sequence Number=SeqID_5629
gtcgtagcctctagactcaagtgagggcgagatgagggccgcggactgtggtcgcgtcgtctacttgaggaaagcatgattactcgttctattatcatatctgtgatcgttgtgtttgtatattattcatcatacgttacttgtgcgcttgtggtgcttgttgtgcgggtcttgtgtgcggtttccgtccttgatcgtttgtgtcgnacctttctcgtgcgtcctcantctgacgcaagancgcgacacacgccggggcagatgggtgcgcattgagcgcggcgttgttcatgacccagccacctaaaataacccacgaacaactcattctgcagtcagcgcgtgacacgcaccctctatttcgtcagtgttcttgctgatgccgtagatccattattgtgttagacnatatcttcttgtgttcgctctggtcgctataaatgaagaagagggaagagagaagttgggattctgtatacgcacgccgacacatcgaagggaggaggcccctcggtaacgctcattcttggtatggctactgtcgcgtacggt

SEQ ID NO: 15409 - DNA, 437 bp, Glycine max
  misc_feature (397)..(397): n is a, c, g, or t
  Coding DNA Sequence Number=SeqID_5630
actggtcgaggatcggagtgataacaccgcagactgaggatttgcttaagcttgcagcttttctcgtggttcccttgtgtatttttctaattttttttctgcccagcgagcaaaattcttgaattcttctactggaatttattgagtttggttgaatatcttgtatacttggggtttaaaactcaatggaatacaatagtcgttctaaatcccgaaaaaaaaaaaaaaaaaggcagcaagcggaaaagtgaagaggggcgtcttaacatctcgcccacacagctttccttttacttttattcctcccccctaatttttacctcctacccatgggttattcggtgaacccgttcctctctcctcttcctccgcgcacctcagtagatcctccttattnaaaaataaccgaggggaaattctcaaacacccataagcgg

SEQ ID NO: 15410 - DNA, 549 bp, Glycine max
  misc_feature (44)..(44): n is a, c, g, or t
  misc_feature (108)..(108): n is a, c, g, or t
  misc_feature (508)..(508): n is a, c, g, or t
  misc_feature (516)..(516): n is a, c, g, or t
  Coding DNA Sequence Number=SeqID_5631
ataagtgtggtatgttcgcaggagtggtttgtgtgtgcactctnctggttctgatagtcatatacaagatgcagagagtaaaccaaatcaggatagtgagaacggggnacaagtataatgagtagaggcagaagtgcgacgtatgccatcagacgagagtaacgagcggcatagatggcgaagcgggcagaggccactgttggtggcggcggctggcgaggagctatgcgcgacagatggtattccatcattattcccaactagcgggcataattcttgtgctgtatgttcggtcgtgaatctgtatggcaggacgaaggaggtagaggaggcagtgagatcagaagagacaaaagataacgctgtagcgcggtagtgttgttcgtcctgctgtgggtgtgtgagactcctagcgaggcgtggacgccacgctcgtatcgtgccaccgcctcacgtcctatgaccgtattctctctccgtcgccctcgtgtgtccatgtgcggacacnccgatgtntataaatatagacatctctggtggagtcgtcca

SEQ ID NO: 15411 - DNA, 445 bp, Glycine max
  misc_feature (41)..(41): n is a, c, g, or t
  misc_feature (47)..(47): n is a, c, g, or t
  misc_feature (99)..(99): n is a, c, g, or t
  misc_feature (110)..(110): n is a, c, g, or t
  misc_feature (116)..(116): n is a, c, g, or t
  misc_feature (196)..(196): n is a, c, g, or t
  misc_feature (303)..(303): n is a, c, g, or t
  misc_feature (372)..(372): n is a, c, g, or t
  Coding DNA Sequence Number=SeqID_5632
atcactgctcatagctgacgcgtacacacagcttctattancatctngtgcagatgtacgctgggacgcttcactcattgtctcgatatgtctactgcnacacttctgcnactcantaatcgctgtatacagacggcgcgtcgacctcacatcttatgtgtctcaactcgcgtcgactctcgatgtcaacatagcnatcaccttctgcgactcatcgcagacacgagcgtgaggagagaactgcgtcgatgtatcaccgtgtgagcactacgcgcgctcttcgcgcgtcatacgcgactgctncgatgctccgtgtcgtggtatctgacgacgatgcatctcgtcgagagctctctctccctctctatttcngcatcgtggtactgcatgtgcgacaccacgacgatagccgcaatgacctctgcacccaaggtacggacgtata

SEQ ID NO: 15412 - DNA, 399 bp, Glycine max
  Coding DNA Sequence Number=SeqID_5633
gtgtctagctagatagcactgttctaacttttcttattgattattatccatctatctacgactttggtctaatttatgatcaagcaaaaaaagggccaaagcccctaaacgaacaataaattagattatagcatagtgaagaatggcagatcatttgctgttaaggatgagatattctgcttgctcgagggggctctaaacaatctgtgcatcctgagacaacagtatggactgaccaagtcaggcaatgaagtggttttggtgattgaggcttacaaagctttacgtgatcgagcaccataccctgacaatcatgatgaatgccatctcagtgagagctatgctttcatagaccctgacaagaccacttctacactttttgcgacttctgatcaagct

SEQ ID NO: 15413 - DNA, 105 bp, Glycine max
  Coding DNA Sequence Number=SeqID_5634
aggctggtggagacccaaccatgtctacatgcactatcactacaacaatgaaaggaaactgatcttcttatcagtgatttgcacgacaaattagttttagacata

SEQ ID NO: 15414 - DNA, 580 bp, Glycine max
  Coding DNA Sequence Number=SeqID_5635
ttgcgctaccacagaaaatgtctttatttttggtgcagcctcttgcgtattcgcgacatttattagtccactcttgccattgtctatggaaactctagttgaatactcgttccctgttgctgaagctacttcaggaggtttctggtttgtgtttaatcaattcttgtcgactgttgaatctttgggtgttgatgctatctttagcaaagaaccaacaaaatcagaaggaagaatcgcgtttattattatgattgtgtatcaagccgtcgcagtgcttttaatggcgtttgttaaagaaaatctccagcggaccaaattcgaaaaagaaggtttgctggttttggatgaaattctcgatccaaataagaaaaacaaggaacagtccatacatcaacattctgttgatcgacaatattatccatagttccatacgtattttattttaaagaactttctgatgataaaaataagcctaaaatatgtttaaataagattgagttcatttgagaatatattattaataatctaaaacctctagtaaaaagtaatgaaattatagacttaactaacctgccaaaga

SEQ ID NO: 15415 - DNA, 574 bp, Glycine max
  misc_feature (194)..(194): n is a, c, g, or t
  Coding DNA Sequence Number=SeqID_5636
cccacacggatataagggcgggcgcgccacctataatcaaataaatacaaaaaaaaacacggcggagaaaaacagaacgaacctcgaggggtaccgggtcatctaacggagacaataaataacaaccggcgcgcgcgatgccaaggggcaaaaatagcaccaagggacgcaaaaatcgactgtggtgttttttnggggccgggggcgagaggaggggggcggtttttattcgccgcctcagcacccacaggagacaaccggtggggaaaaaaaatacaaccgcaagaagatgtatatggaaaaaaaagggcgagaaaaaacgggagggggcgggagaggtaacaattcaagccggagaaaagatcgcagcgcgcgaccaggggggaaaaacccaggggggtcaacagcacagggtggggggcgcgggaaagggaaaaaaccattatttaaataaaatcctgcatgaaagcgcaacaaatatacatcatgcgtaatagaaaggggaaaactggaagggaaaaaatacgggaaaaaagccaagccgaataacggcgggattcaactccacaggaga

SEQ ID NO: 15416 - DNA, 400 bp, Glycine max
  misc_feature (72)..(72): n is a, c, g, or t
  Coding DNA Sequence Number=SeqID_5637
atcgcaatcatacggggctcctccgcatcgcaatatacgggggttcttcggcaaccgaaccctaaggggggncggcgcccggtcagccttaattcggctccccctaagcccaaacggtcggggccctaagccggccccctaaaaaaaaccccccgaaagaaaaagttccccctccccacgggggaaggaaaaaaaagggggggttacccgggtcccggggtaaacgaagccccgtttcgggggttggtggcatcaggggttccctcccgaggaaaaaacccaaaaaggggggggggggttcccaaagggggggccacgaagggggggggggttttttcaccgaccaaggagaagggggggagaggttttttttcttataatcaaaaatttttggccctca

SEQ ID NO: 15417 - DNA, 484 bp, Glycine max
  misc_feature (285)..(285): n is a, c, g, or t
  misc_feature (389)..(389): n is a, c, g, or t
  misc_feature (432)..(432): n is a, c, g, or t
  misc_feature (439)..(439): n is a, c, g, or t
  Coding DNA Sequence Number=SeqID_5638
acccctgtgtgcgtctgtggtgttgtgagtgtggtcatgtgatagtggtgtgttgtgtgtgtcttgttgcagaatgtttggttgtgccaagagtcgtgtcgtcgttgtgtttccttgtgttgaggcgcgtgggttgtccttgttggtagtcgatgccgcgcggttagaatggagataaaagaagagatagaggagaagagctgaacgagggaaataaaggaagctttcacgatagtaaataggagagcataagaagtgaagggagagagatagacgagaaggagngcgaatatatggattgtatgtgagagtctgtttataatatctgtgatgtaggccgagccgaacatgttgtaggtttgacgtgtgctctcacattccatattcantgtattgtgtctctctctctttgatttcccgttctccctttcnctattantgatcgtctcacatccacacgtttcttatctcaccaatcaccacg

SEQ ID NO: 15418 - DNA, 147 bp, Glycine max
  misc_feature (64)..(64): n is a, c, g, or t
  misc_feature (67)..(67): n is a, c, g, or t
  Coding DNA Sequence Number=SeqID_5639
ccggttttcactcgcgtcgaattgaggaattgtgagcgatggatttctcttcggtgagggctgngtnggattctaagtcatactacaaggtctgcggatgtgttctacaactcgatgcttcaggttgcacggtgagggcattgctta

SEQ ID NO: 15419 - DNA, 165 bp, Glycine max
  misc_feature (132)..(132): n is a, c, g, or t
  Coding DNA Sequence Number=SeqID_5640
tgacggggcgcctgcacagatcccacccaagatccggcgtgagatcaccagggtcgagttggccggcatttccttccaccgtgagctcgccaaggagcttaggcagctcagcatgagggttacccgaggccnaggtgcggcgagggtgaacacggcggacgccgc

SEQ ID NO: 15420 - DNA, 109 bp, Glycine max
  Coding DNA Sequence Number=SeqID_5641
tgatgtgatttatatttagggagaaggtagagaacaaatggtcacgatttgtgctgattatatggttctttgtggtactcatcataacgcaaagttacactgcaagttt

SEQ ID NO: 15421 - DNA, 583 bp, Glycine max
  misc_feature (320)..(320): n is a, c, g, or t
  misc_feature (390)..(390): n is a, c, g, or t
  misc_feature (399)..(399): n is a, c, g, or t
  misc_feature (545)..(545): n is a, c, g, or t
  Coding DNA Sequence Number=SeqID_5642
gcgctccgtcacatcatgatgttatgtttcgtgtctatgtgttagctagtatagagacgtgcagataatagcggatcattgcatgctgacttcgcactctcatgagcgattctagcgacatatgtggaagagtcagggcggcgacggatctagaagcctacatattgacacactacgacctctgtcctcgaccgacaagtcagaagcagacgcgagaaccgtcgctccaccaccttcatcagttactatcgtaatcgtagtagcgcggtcgctgtcgttaggagtcaacatgcgacagcgaagcacagcgcagaaacgcnacatcaccgatgtagaagagaagacgaagagatcatagcgctagctacagcagatcgcacgggcagaganatagtcacnctaccgccatcaacctcaccgacagagactcggcggagggacggatgcgcaggcacagacgtgataggcgagggccgcgacccgcggcctcagtaccggagcgggcggcgcgtgtgtgcgcgcggctgtgtgggcctcgcgtctgncgtcccggcgtcccacgctacgacatgacacgatgaga

SEQ ID NO: 15422 - DNA, 517 bp, Glycine max
  misc_feature (175)..(175): n is a, c, g, or t
  misc_feature (189)..(189): n is a, c, g, or t
  misc_feature (199)..(199): n is a, c, g, or t
  misc_feature (201)..(201): n is a, c, g, or t
  misc_feature (205)..(205): n is a, c, g, or t
  misc_feature (275)..(275): n is a, c, g, or t
  misc_feature (282)..(282): n is a, c, g, or t
  misc_feature (290)..(290): n is a, c, g, or t
  misc_feature (299)..(299): n is a, c, g, or t
  misc_feature (307)..(307): n is a, c, g, or t
  misc_feature (442)..(442): n is a, c, g, or t
  misc_feature (444)..(444): n is a, c, g, or t
  misc_feature (455)..(455): n is a, c, g, or t
  misc_feature (467)..(467): n is a, c, g, or t
  misc_feature (490)..(490): n is a, c, g, or t
  Coding DNA Sequence Number=SeqID_5643
gatctagtgactatgcagcgtccgcgtcgcgacagtcaccaggcgcgttcagtcttgtacgacgcgtctcgtcagtatgatgagttcttcgacgcgcgacggtcgtaagtgatgcgcgctcgtcttcgctctcgttgtcatctatgcgcacacgcgatctatctctgctctcttngccgaggccgactnctagtgttancntcgnggatcgtacgttacagacaccttctgtatcgtcgatcgccgcacgatatactcgcggcgcgacgcacgantatcgtntacgcatntcgactcanttgtcgantggccgtgtccgtcgtccgtcttctgctagtgatgtgcagtgagtgacatgcgagcgactcacgcgtccgtcgtcgtcggtgtcgacgaccgcgatcgcgcgcgtcagtccgtatgaagagtacgcgagctgcgnantgcgtacagcnacggcatatcgnatagacagtagatgctacgtagncgtcgtcatgacgtcggacgactcata

SEQ ID NO: 15423 - DNA, 550 bp, Glycine max
  Coding DNA Sequence Number=SeqID_5644
ataggcatacccattttctgtacgcgcggggtacgagagtggatagctagaatggagggcatcacatgtttggattttctatggtgcaaatggtcagaacacatgctagtaaactcgatcagcctttaagagagaccgttcttcacctttataaaccttttaaatggacgccatgctttcttcatcgttttttcgaaggcagactgaagaagaaaaagaaacttcgtgtgatcattgaatttaaggaaggtgcagctgaagcagagattcaaagcacaaaacagctcatgaaaaaaagcagaaaaacaaatataaaacgacatttctcacatatcaattgctgcgctgctgatctaacacctgctgccttagaggatttattagcaaacggtgagcatattcgcaaaatttatttagaccggaaagttcatgcgctgctagatgtagccacacaagcaagtcatgctgaagaagtcatccgaaacgggacaactttaaccggggaaggcattacggtcgctgtcattgacacgggaatctatccgcatga

SEQ ID NO: 15424 - DNA, 306 bp, Glycine max
  Coding DNA Sequence Number=SeqID_5645
gtcgaatacgcctacctaggccataatctactattataaggacagccaacagacttggaccaggcaaaagcaaagtccactctcgaccgctctgatgatctctctacacccttgctttctcgaagtctcagcttgccttgtcggaactccctcctgttccggccatcacacttctttctctggtcacgtccctcagattcaccctctctagctagttcccaacaacaaactccacggttccacacttcatactaccctgtaaccggaaaaccagaaaaggtgtcgctgtagggaatcacattatgg

SEQ ID NO: 15425 - DNA, 531 bp, Glycine max
  misc_feature (118)..(118): n is a, c, g, or t
  misc_feature (130)..(130): n is a, c, g, or t
  misc_feature (169)..(169): n is a, c, g, or t
  misc_feature (230)..(230): n is a, c, g, or t
  misc_feature (316)..(316): n is a, c, g, or t
  misc_feature (438)..(438): n is a, c, g, or t
  misc_feature (451)..(451): n is a, c, g, or t
  Coding DNA Sequence Number=SeqID_5646
gtatgctcgtcctgtcattctcctctgcccgctgactaccaccttgttcacgtattactcttctttcctttcttcatcatcgctcatcttgcgcttcataccctaccctgacgacggnacccgtcccacnctcacttcaccccgcacacccactccgctaccctcttcntatattctatttccttactctcacttcaccctactcacatcctgctcacactacacgtccncaccctcgctatattttttatacactcccacttcgcttctatcattctctcccctctccctcccgactcatcctcgcaccatacgnccctataattgcagcttgttactgcacgtctctgtgcgttcgcacgaccgcacccagcagctcccgccacacacattcgtcgagcgcccacacacttaattctcccccttcgagttctcacntctttcgacactnctcgaacaacatcgtatatattcccagtcctactccacccctacatgttcatttattgtcattatactcatctcctcaac

SEQ ID NO: 15426 - DNA, 337 bp, Glycine max
  Coding DNA Sequence Number=SeqID_5647
ttcggattgccgctgctggagaccagagagcgcggttcccgagcaaaccctagcctcccacgatggtgctgcagaacgacatcgacctgctgaacccgccggcggagctcgagaagctcaagcacaagaagaagcgcctcgtccagtcccccaattccttcttcatggacgtcaagtgccagggctgcttcaacatgtaatttttcttcaccatttgtcttctttgcaactgcatagttcagtaggttcatttgctactggttagccttagatgttcatttgataacaagacatagtcgtcatgctttaaaaacgttcttgctatttctgtaagtaa

SEQ ID NO: 15427 - DNA, 526 bp, Glycine max
  misc_feature (146)..(146): n is a, c, g, or t
  misc_feature (229)..(229): n is a, c, g, or t
  misc_feature (255)..(255): n is a, c, g, or t
  misc_feature (308)..(308): n is a, c, g, or t
  misc_feature (363)..(363): n is a, c, g, or t
  misc_feature (398)..(398): n is a, c, g, or t
  misc_feature (404)..(404): n is a, c, g, or t
  Coding DNA Sequence Number=SeqID_5648
aatatctggcaacgatgctcggcatcgcgcgaatgactccgataccctggtaacgtgctgtactccgtcgacagaattaatactcatcgccgtgctaagagatataaggataagtggcgcgcactatcctcggaccacacacacanacactatctcttataagagatggacgctaacgctcactcatgctctaagtgagtgtcataagcgacacactcgcggtagatancagtagatagtgtattatagtgtagntaatagagcgccagacttcagccgcgcgtaaccgcaccagtgacacctaatcntgacgaatatctaagactcttctctctcagcggctgttgtgagcctacgctcatntcatatgtggactctccttctgcgcgcaccgcgangccgancattatgctacgacgaagtcgcacggctcacactttatctatcacatgactagcatcacggcgagtcacatagctctgtcacacggacacttgtcccatacacagctctatgcgtcgcgaca

SEQ ID NO: 15428 - DNA, 458 bp, Glycine max
  misc_feature (90)..(90): n is a, c, g, or t
  misc_feature (92)..(92): n is a, c, g, or t
  misc_feature (99)..(99): n is a, c, g, or t
  misc_feature (164)..(164): n is a, c, g, or t
  misc_feature (196)..(196): n is a, c, g, or t
  misc_feature (256)..(256): n is a, c, g, or t
  misc_feature (353)..(353): n is a, c, g, or t
  misc_feature (356)..(356): n is a, c, g, or t
  misc_feature (387)..(387): n is a, c, g, or t
  misc_feature (401)..(401): n is a, c, g, or t
  Coding DNA Sequence Number=SeqID_5649
cactcactgtcgatgtatgcaatagtgagctcaaacgacgtgcgacaatatgagatctaatataatagcgtctactagaggtacgatgtngnttaaatntcatttgtatcaaaattagacagacaaattaatcatatatcgcactgctaaatcttcgagcatcncacacaatacatactacagctcccagcagcanatatacgactgcacagagtacaacgcgactatacgagttctgctcgccgtctcttttgcnctcatcgccgacgcctctgcacactctctagcttgtatacatcttaactgcctctccgcgtcgtttcctgctgtctatctccatcctatcatatctnacnactccacaccgtgacacatgagagcaatcantacgtaattgacangatcaaatagtaatgatgtataacgggaacaaatgagcgcgaggtaacgatgaatta

SEQ ID NO: 15429 - DNA, 506 bp, Glycine max
  Coding DNA Sequence Number=SeqID_5650
attcagagactttcttaaatgcagtaaagaatttgaataatcaaagagatcgcaaacttgaacttgagattgagattttaaatgtagaagcatataaaggaaagagtgcagaatcaccaaaagaaaaattagaagctgcaaaatcacttaaagatgaaggtaataaactatttcaacaaggtcgttatggtattgcaaaaagaaaatataaacgtgcgactgatttgtgtgattatttagattcttttgaaaaagatgagatcgcagcgtcaaaagatgtgcaattgccagtgtacttgaatttggcagctgttgatttgaaagagaaagattataaatctgcgatcgataacagcacaaaagcgttagcaattgatgcaaagaacgtaaagggattgtatagaagagcacaagcacatcaaggattaggtgatttggaacaagcaaaaacagatcttgctgctgcgttagttgcagaaccttcaaacgctgctgtgcaaacgtta

SEQ ID NO: 15430 - DNA, 594 bp, Glycine max
  misc_feature (27)..(27): n is a, c, g, or t
  misc_feature (36)..(36): n is a, c, g, or t
  misc_feature (60)..(60): n is a, c, g, or t
  misc_feature (65)..(65): n is a, c, g, or t
  misc_feature (110)..(110): n is a, c, g, or t
  misc_feature (120)..(120): n is a, c, g, or t
  misc_feature (125)..(125): n is a, c, g, or t
  misc_feature (156)..(156): n is a, c, g, or t
  misc_feature (161)..(161): n is a, c, g, or t
  misc_feature (174)..(174): n is a, c, g, or t
  misc_feature (199)..(199): n is a, c, g, or t
  misc_feature (209)..(209): n is a, c, g, or t
  misc_feature (217)..(217): n is a, c, g, or t
  misc_feature (231)..(231): n is a, c, g, or t
  misc_feature (281)..(281): n is a, c, g, or t
  misc_feature (283)..(283): n is a, c, g, or t
  misc_feature (289)..(289): n is a, c, g, or t
  misc_feature (313)..(313): n is a, c, g, or t
  misc_feature (334)..(334): n is a, c, g, or t
  misc_feature (343)..(343): n is a, c, g, or t
  misc_feature (351)..(351): n is a, c, g, or t
  misc_feature (368)..(368): n is a, c, g, or t
  misc_feature (405)..(405): n is a, c, g, or t
  misc_feature (409)..(409): n is a, c, g, or t
  misc_feature (430)..(430): n is a, c, g, or t
  misc_feature (445)..(445): n is a, c, g, or t
  misc_feature (462)..(462): n is a, c, g, or t
  misc_feature (535)..(535): n is a, c, g, or t
  Coding DNA Sequence Number=SeqID_5651
acactgacgtatgagctaaacatgtanagctagcangcttgcagctacagacatcgacgnatgcngacatatatgacgcatcgatcgatcacacagctgtgtaacagtantccgactgcntcgtncgtgtcgcgcgctgagtgtcgacgctgacgngtgcngtggcgtcgaccnatacagatcgatatgtactatgcgnacgattgctnggtgtgtntggtatgagcactnctagagcgtagtcgcgtctcaaaacgaatccagggacctgacactgagantntattcncgtcgtcgacaacagatacgtatncgcgcgtcgtaggcgcgttancgtgcggtngacgatanccactgatgagacgtanacacgtgtggacaatgatagaagtgactacacgatangcgngagatagacacaccgagacangagtagaactaaaantatacaatgccacaganagacgacatacctgagtcacacctgtcttgagcgtggctgtcggtgtaggcatcacacagtatcacatatcanatcgcaagctgaccgacatctcatcatactcactgcgacatcagtcactatacatcata

SEQ ID NO: 15431 - DNA, 552 bp, Glycine max
  misc_feature (227)..(227): n is a, c, g, or t
  Coding DNA Sequence Number=SeqID_5652
ctttgttctctaacactgcatggggtcagaatgccatcctagattttcttacgaatcttctgggagatatattgtgaagcgcaaccagctttgacgtgcatctgtagttcaagtagatgttcattcaagagattttttaactgtgtcaaagatccgtggtaggtggggaggttttgagacactagaaaagtgggtaactggtgcatttgctggtcatacagcagttngcttgaaggatgaaattggaaatttatgggttggtgaatctgggcatgagaatgaaaagggtgaagaaataatagtggtaattccctggcatgaatggtggacattagctcttaaagataattccaacccacagatagccttgcttcccctgtcatccagagctgcgtgcaagattcaactcgactgctgcatgggaatatgcacggagcatgtctggcaagccatatggttatcataatatgatattcagctgcatggtccctggtgctgacaacttgcctccgcctcgcgatgcccccttggtgccttctgccatctcgatgg

SEQ ID NO: 15432 - DNA, 565 bp, Glycine max
  misc_feature (67)..(67): n is a, c, g, or t
  misc_feature (83)..(83): n is a, c, g, or t
  misc_feature (86)..(86): n is a, c, g, or t
  misc_feature (95)..(95): n is a, c, g, or t
  misc_feature (109)..(109): n is a, c, g, or t
  misc_feature (182)..(182): n is a, c, g, or t
  misc_feature (222)..(222): n is a, c, g, or t
  misc_feature (313)..(313): n is a, c, g, or t
  misc_feature (316)..(316): n is a, c, g, or t
  misc_feature (318)..(318): n is a, c, g, or t
  misc_feature (323)..(323): n is a, c, g, or t
  misc_feature (364)..(364): n is a, c, g, or t
  misc_feature (538)..(538): n is a, c, g, or t
  Coding DNA Sequence Number=SeqID_5653
tacaatatcatagccaactactagtatatgatagaatgtataatacaagttgtattgatattgtaanaccaatagatacaaanaancacatacanatactatatatcanttatatgtatacttatgtgataagaagagtacgctgtgtgtgttgccatgtgagtatgctatcgatattaganatttcattagttcagtgtcagagtacaaatataatagtanagtaatatgtacgtatgatgatgtatgttgacaagcacacatacaccattataatgataaggtgatgagagaattatatgtataaataaanaananataangacaataaaggtgtgtatagtcatattgcattatagccatnaacgtctcatatagaaatatgactacaagacattactcgagtgctatatccgttatgcacaccccacactaccagatctatcacggtcattgtgatattgtttataggcgcaactcttccacacaactccaacacgaggacacgtgtacatatatgcagatgtatgatatgaanaggagaagatatagcacatcaccacat

SEQ ID NO: 15433 - DNA, 160 bp, Glycine max
  Coding DNA Sequence Number=SeqID_5654
ttgcccacgttctgacggtgatttttcagaagcatatggctccgcttttggatgcctactaaaacacgaaatacttgcctctggattctcgacctaaaaagaccagtgcctattgcaggaggcttactacacaccatgcatcatttaagacacagaggga

SEQ ID NO: 15434 - DNA, 560 bp, Glycine max
  misc_feature (26)..(26): n is a, c, g, or t
  misc_feature (38)..(38): n is a, c, g, or t
  misc_feature (60)..(60): n is a, c, g, or t
  misc_feature (93)..(93): n is a, c, g, or t
  misc_feature (98)..(98): n is a, c, g, or t
  misc_feature (184)..(184): n is a, c, g, or t
  misc_feature (194)..(194): n is a, c, g, or t
  misc_feature (199)..(199): n is a, c, g, or t
  misc_feature (203)..(203): n is a, c, g, or t
  misc_feature (239)..(239): n is a, c, g, or t
  misc_feature (252)..(252): n is a, c, g, or t
  misc_feature (255)..(255): n is a, c, g, or t
  misc_feature (280)..(280): n is a, c, g, or t
  misc_feature (334)..(334): n is a, c, g, or t
  misc_feature (413)..(413): n is a, c, g, or t
  misc_feature (487)..(487): n is a, c, g, or t
  Coding DNA Sequence Number=SeqID_5655
cacacgacactcacgcggaggagatngagatgagacangtagcaatagggtaaagcatgngagccatgagattaaagatcaaacaaggagaanatcantacatgatgcacacgacctctacatcatgtgtcctcatcctcttgcttcactgttatgcacacaccatctcgcactgatccatganacgcaattcncaaanctanccatcgacacagatgtacagatcactatacatacancacagaatatcangancatcgactcgactagcactagagtnctacattatcacacgcgctgcatacacgtatctaatatatctatgcattcagcnacatcgcactcgacgcgcatcgtctgcaccagctaccacaccatcacgtgtcatgtgtgttgtggagtgcatgagccancgcacacacactcacagacgacagagtagagcatgagtacagtctctacagaggacgatgactaagcagttgantgagagctgagcgaagccctagtcacgtataagatcgcgttggtgtcgtttctactcgcgtatcactcattat

SEQ ID NO: 15435 - DNA, 109 bp, Glycine max
  Coding DNA Sequence Number=SeqID_5656
agattctaagcgtagttctcttctctatcctcatttctcaagggtacagccaatgtttcttgagtagtatatctgtaagccaatttcaaacaggagttaaagttcaagg

SEQ ID NO: 15436 - DNA, 530 bp, Glycine max
  Coding DNA Sequence Number=SeqID_5657
agctggagcagctggactaccaccactacctgcccatcttcttcgacggcctgcgcgagaaggacgagccgtaccgcttcttggccctgcagggctgctacgacttgctggccaagggcggcgcgaagatcctgccgacggtgccgcagctcatcatcccgctgaagaccgcgctcaactcgcgcgaccccgagattgtgtgcgccgtgctgaagatcctgcagcaactcgtggccgctggtgagctgattggcgaggcgctcgtcccatactaccgccaactgctgcctgtgctgaacctgttcaagggcaagacgaagcacatgggcgacgccatcgactacagtcagcgcacgcgcatgaacatgggcgatttgatcgaggagacgctgcagctgctggaggtgcacggcggccccgacgcgttcatcaacatcaagtacatgatcccgacttacgagtcgtgcgtgctgaattgaacggtcgaagggtcgtttgtctgaaaatttgctgcgagtagacacactttt

SEQ ID NO: 15437 - DNA, 542 bp, Glycine max
  Coding DNA Sequence Number=SeqID_5658
agagcttctcgcagagatttggataaaagaagtccacaaaaagacagaagatcagatcatcgtagggatcgcaaccgtagtcgcagccgaagcccaagaaatgtcgagagaaaagagagaagaccaagagatcactcttcagacagacaccatcccaaaaaagaaacctcaaaagaaagaagcagacatagagaaaaatccaaaagcatttctcaagaaaaaagaaaagaagaagtcaagagaaaaaagagagaagattctgaacaaaaagaaaagagaaagaggcgcgacagcagtagtagcagttcttcaagtgaaagaagtagaaagagtaataaaagtcaagaaaaagaaaccagaagaagaagaagacatgactctcgatcttcatcctcctcttcgagatctgctagtcgctccagctcttctagctccagatcctcaggttcaagatctgactaattccttttgttcgcctgtttgatcttggattcatatgcttcaaatattttttctttataattacccgttcattgagttta

SEQ ID NO: 15438 - DNA, 471 bp, Glycine max
  misc_feature (41)..(41): n is a, c, g, or t
  misc_feature (70)..(70): n is a, c, g, or t
  misc_feature (140)..(140): n is a, c, g, or t
  misc_feature (157)..(157): n is a, c, g, or t
  misc_feature (181)..(181): n is a, c, g, or t
  misc_feature (194)..(194): n is a, c, g, or t
  misc_feature (212)..(212): n is a, c, g, or t
  misc_feature (216)..(216): n is a, c, g, or t
  misc_feature (219)..(220): n is a, c, g, or t
  misc_feature (231)..(231): n is a, c, g, or t
  misc_feature (235)..(235): n is a, c, g, or t
  misc_feature (242)..(245): n is a, c, g, or t
  misc_feature (253)..(253): n is a, c, g, or t
  misc_feature (268)..(268): n is a, c, g, or t
  misc_feature (290)..(290): n is a, c, g, or t
  misc_feature (293)..(293): n is a, c, g, or t
  misc_feature (295)..(295): n is a, c, g, or t
  misc_feature (325)..(326): n is a, c, g, or t
  misc_feature (328)..(328): n is a, c, g, or t
  misc_feature (331)..(331): n is a, c, g, or t
  misc_feature (341)..(341): n is a, c, g, or t
  misc_feature (347)..(347): n is a, c, g, or t
  misc_feature (353)..(354): n is a, c, g, or t
  misc_feature (359)..(359): n is a, c, g, or t
  misc_feature (379)..(379): n is a, c, g, or t
  misc_feature (395)..(395): n is a, c, g, or t
  misc_feature (397)..(397): n is a, c, g, or t
  misc_feature (400)..(400): n is a, c, g, or t
  misc_feature (412)..(412): n is a, c, g, or t
  misc_feature (428)..(428): n is a, c, g, or t
  misc_feature (431)..(431): n is a, c, g, or t
  misc_feature (443)..(443): n is a, c, g, or t
  Coding DNA Sequence Number=SeqID_5659
tgccgggcgggacgtgagcacaaacgggttaacgagcgcanttacatgagactctgtctgatggcgctgnaattcatattgtacccagagttgacggggccaattcccgtggcgtattccatattgtctgggggctggcnacattgccggatcattntttaccggcggagccacccttgcnccatggggggcanccattggggccggtggtntgancgnnatcctgttttntctnggtgccnnnntggcgctnggtggtgtggcgcanatgctggcaccgaaagccaganctncncgtatacagacaacggataacgcctgcatnncnggnggatcactanttctanagcggnngccancgcggtgatctcactttagncccttatgaggttaangncanctggcgtaacanggcatagttgttctgngtnaatgtgtcgttncattccacaacatcaaccgaacataaat

SEQ ID NO: 15439 - DNA, 135 bp, Glycine max
  Coding DNA Sequence Number=SeqID_5660
gatgctgaaaattttaaactctttcaaagtttatatgagccttggcaacagtggtctttatatatccaaaatgcaataaaaccagcagacctatctcttcgagatctaaactccaccttaattcgtggaaaagag

SEQ ID NO: 15440 - DNA, 504 bp, Glycine max
  misc_feature (26)..(26): n is a, c, g, or t
  misc_feature (32)..(32): n is a, c, g, or t
  misc_feature (428)..(428): n is a, c, g, or t
  Coding DNA Sequence Number=SeqID_5661
tatagtctctgtgcttgtatgtacgncatganttgactctctatgcttcatgttcgacatcccaaagatataaatacactcaccatgatagaagttcgataaagcgcaccgtccaatgccttctgttaagagctcgtgtaatgagtctttctagtaccatttctactacactttaataattatctctatagatttacacggagccgtctatttgatattgtcagatggggtgctcctccctacgtaaatagcaatatgtacaattatagcttaggtctgacttatgtagatacgacgataatgggagacatctgaatactactacctcctattataagtgcgtagtgatgatctagttcctctatctatcaatgttgcgaggtatacagatatatttcttttcccaacagacagaacaagaagactanaaagagtagattgaccttctcagtcccgccgcgcggggagtgcctatcttattttacgtaaataagcgcgccgccg

SEQ ID NO: 15441 - DNA, 594 bp, Glycine max
  misc_feature (441)..(441): n is a, c, g, or t
  Coding DNA Sequence Number=SeqID_5662
agtatcatatatgccgccggtctcatgcgatatttgtactcaaggggggtattatatatataatttccctgcgggcgggggttgtataactttttataaattaccctccctcgggacttcctaaaccagccttcttagcgtgtatatttgggtctcgggggggttcgcacgcccccccccctatatataagtcgcgtggcctttagcgatatctcaaataacatagcgcggttggtataaatatcatcgtaggcgggcgggaataggtaattttatataatatagggggataattaggagcggatcgtcgcgggtctatcctataaatatttagcgtgggcgacataaatgtgcgcgcgcgcgaacaatggtgttaaagaaatggtgggggtgcaaaacagtgcaatgtgttatttggggggcgcagtatgcgacaccgcnttttatatcaataaccctcagtctgtcttatacgcggatacgcttcagaacaatcggatcaaccaaccggcggaacagggcatgaaaaaacgaaagcgcaaaacgcggccagcgggtatatgggcgggggagaaatatcggacggcaccaata

SEQ ID NO: 15442 - DNA, 379 bp, Glycine max
  misc_feature (174)..(174): n is a, c, g, or t
  Coding DNA Sequence Number=SeqID_5663
ttttgacacataccgccgcacgacactccttaccgatgccgacaacccgcacacgctagacacgactacacacgatcaaccgaacagcggcgccacgccggcgcatgctcactctcgcgtgcggctgagcgcgatcgcagcagcgcgctagagatgacgcggaggctgagattnctcgctcatctcgcgagagttggcgagagggtggtggagagacgtgggaggcagggacacaggatgtgatagaaagcgagaggacgcaaaacattataaagaaaatatagaacgcctccaagaataaagatccaaccacgatagtgatagggtcaccaccactcacacttagccatcatataacacatctatccgtcagatctac

SEQ ID NO: 15443 - DNA, 514 bp, Glycine max
  misc_feature (48)..(48): n is a, c, g, or t
  misc_feature (56)..(56): n is a, c, g, or t
  misc_feature (90)..(90): n is a, c, g, or t
  misc_feature (112)..(112): n is a, c, g, or t
  misc_feature (121)..(121): n is a, c, g, or t
  misc_feature (131)..(131): n is a, c, g, or t
  misc_feature (206)..(206): n is a, c, g, or t
  misc_feature (211)..(211): n is a, c, g, or t
  misc_feature (235)..(235): n is a, c, g, or t
  misc_feature (254)..(254): n is a, c, g, or t
  misc_feature (259)..(260): n is a, c, g, or t
  misc_feature (270)..(270): n is a, c, g, or t
  misc_feature (272)..(272): n is a, c, g, or t
  misc_feature (275)..(275): n is a, c, g, or t
  misc_feature (300)..(300): n is a, c, g, or t
  misc_feature (302)..(302): n is a, c, g, or t
  misc_feature (343)..(344): n is a, c, g, or t
  misc_feature (392)..(393): n is a, c, g, or t
  misc_feature (402)..(402): n is a, c, g, or t
  misc_feature (405)..(405): n is a, c, g, or t
  misc_feature (412)..(412): n is a, c, g, or t
  misc_feature (424)..(424): n is a, c, g, or t
  misc_feature (440)..(440): n is a, c, g, or t
  misc_feature (474)..(474): n is a, c, g, or t
  misc_feature (483)..(483): n is a, c, g, or t
  misc_feature (485)..(486): n is a, c, g, or t
  misc_feature (488)..(488): n is a, c, g, or t
  Coding DNA Sequence Number=SeqID_5664
cacgacagtcactagtgacgatgatatgatgtgaatgagtagtatgangtaggtanatactgatctgctagagaggatgtgtcgcttcangtgtatcgatatagtgaaggcncgtatctgntcttgctcgnacacactatctcgcatctgtctcaggatagcgtcgtgacatcagtcgagtcgatgcggtacgttcatactgactngatangacaactaccacacacatcgtcgncagacgatagacttcaacnaatannacactacatnanacnaaaaaatactgctcttttatatgantntgtatcgtacgcggatgtctgtgagagaagagatgagatannacgagcgtaagctagtagatcgtggatagagagtctcagttcccattnntatcttctnctntctatgnctctacagagangtccgccgcgcgacgngcggcgcgtgtatgtgataaatgaatgttgtgtngaagatgtntnngngtagatcggactcttatgatattacc

SEQ ID NO: 15444 - DNA, 590 bp, Glycine max
  misc_feature (172)..(172): n is a, c, g, or t
  misc_feature (176)..(176): n is a, c, g, or t
  misc_feature (227)..(227): n is a, c, g, or t
  misc_feature (357)..(357): n is a, c, g, or t
  misc_feature (436)..(436): n is a, c, g, or t
  misc_feature (462)..(462): n is a, c, g, or t
  Coding DNA Sequence Number=SeqID_5665
acccgactcatacatggactcagtgacggaagacagtgatgcactctgtgtggcacacgcatactacacggtggcggttgagttatgagtgatgggtgagataggcggagacacgagtgtcatatattttgacgtgtatgatagttatgagtgatgacggcagggacgtgtnaccncggatgctcggcgtcgtgccatgcagaggcgagagatgggatcatgccttngttgcacactgtaacacaggcatcgacacgctgcggtacacgcacaactcgcacacctcgaggtctatgtaagactaccaagcatgcgtgtgcgcgcgatgtcactagccccgaagacggtcacgacggncgcggcaggtgctgtgagagatgtacgcgtggtgttagctggctctacgtgctgtgactagtgctgcgtgagtgttcgnttcatagagtgccgcgtcgccgcgcnctctgaaggtgatgtgagagcacgcctctgcacacggtctcgacgcgagtgcgcgctgactagcgctggggtcgagacgctcgcgtcggatcgtcgcgctgataagcctgacaccaggtgcgtgtgca

SEQ ID NO: 15445 - DNA, 389 bp, Glycine max
  Coding DNA Sequence Number=SeqID_5666
acagctaggatcgtcttcttggaagttgcatgaccttgctactagaagcagtttaatcatccattcagagagagagagggcctcaacatgttgcaaattttactgcctaccataggagaaaactgaaacaaactgtcgcttctaatgaaactcttattgccccgtgtgaaactgtttggacatgacaaatacgtccctttccctcgtgctgctttctcagctcataaagtctaacaagcaggtactggccatttattctgccaggccttttaaggttctagctcctcgggactcatgacaccgaattggcggcttatagtgctttggcagcagtccacatccattagccagtcccttttttatggggtcacgcatatcccatgagaaga

SEQ ID NO: 15446 - DNA, 501 bp, Glycine max
  misc_feature (354)..(354): n is a, c, g, or t
  misc_feature (375)..(376): n is a, c, g, or t
  misc_feature (401)..(401): n is a, c, g, or t
  misc_feature (432)..(432): n is a, c, g, or t
  misc_feature (453)..(453): n is a, c, g, or t
  misc_feature (457)..(458): n is a, c, g, or t
  misc_feature (464)..(464): n is a, c, g, or t
  Coding DNA Sequence Number=SeqID_5667
ctttcaccagttctgtggcaggttttgctacttatattctatttatgcactcaaaatatggttcttctgtagtaatattagttttaatgaaaaatataatactggggagtggggatcaacaattttatcaaatcggttaaagcagcatactggccaagatctgttcacaaagaatataattgttctgtaaattaaaattaagagcgcctagttaagatgtaaatgcaggaacattaactaaaagattggttaatatgttaatcacatactgctgaattaactatcctcttgttgtttccatataccctattttgctcaggaagtgctaaagtggagttatgggattttggtcgnataaccaccctgatcggttgnntggtattctcgggatggactactgnaaggcataccagctaaggcctccttgtgttnaaatttaactggactaaaacntggnntgattngaaaatggaggctccccgcgcgctgtttaatctaatt

SEQ ID NO: 15447 - DNA, 411 bp, Glycine max
  misc_feature (370)..(371): n is a, c, g, or t
  Coding DNA Sequence Number=SeqID_5668
acacttctgtgtaatttcattgattctgtagatctctgctcatcctcgccgtagctaattttcttttgtggacccccttttgacagaatcttgtcgaaattagggaaaataacaaatgggtcaagttttaggatgtgtccaagtcgaccagtcgaccgttgcaatcaaagagacgtttggaaaattcgacgacgttctcgagccaggctgtcactgtttgccatggtgcttggggagccaagtcgctggtcacctttccctgcgtgttcaacagctcgatgttcgctgcgagaccaaaactaaagataatgtgttcgtcaccgttgttgcttcgattcagtaccgggccttagctgagagtgctcagganngctttttacaagcttagcaacaccaggaaccagattcaag

SEQ ID NO: 15448 - DNA, 311 bp, Glycine max
  Coding DNA Sequence Number=SeqID_5669
ttataaagactaagaattccaatttaaattataggactaaaaaaattaaaatataaatcataaaaactaaaaaaatcacttttaacctaaaatatatcaatcatataactataggaactaaaatatatcaatcatgaaactaaataccaaattagtaattttaacctattaattattactctttaacatgaaacattaggaaagtctaatagtaggagattgggatactaatggtagtatagtatcatagctaataggttcgaacttgttcacttctccaaaacatatcatggaggatttgtgttttctgt

SEQ ID NO: 15449 - DNA, 591 bp, Glycine max
  Coding DNA Sequence Number=SeqID_5670
atggctggatggagctcccatgctctcgacgacgacctcaaagctcgtttcatgagaaatcgttcgctgaccaaggacgaggtggaggccttctggaggcaggccggcttcttgtgctgcctgaggcagcacaagaagccggggcccggaggacaacgtcgacggcggcgagaccgtcgtcgcctcctctccccgcaaggggagcccgaggttgaccacgcgtccgccgactctatctcatgtccgttcgtcgccgccggtgatgacgagtagcgtggacggcgacggcgacggcgaggctgccgctagccccagcgccagccgcgactggtggacgaggagcagctgggcgttcctcaatgagccacctccgcagcagcgcgaaggaggaggcgttgggcaaggcgccgcggccgccgtctgatcatcatctctttaattactttgctataagctggctttgtatccctgtaaataagtactctcttaaactattaaatcactatctaaacactcttttattagtttacggagagagtacgtaccagccatgtaattggagtggtggttttgctaatgtttgatttctat

SEQ ID NO: 15450 - DNA, 446 bp, Glycine max
  Coding DNA Sequence Number=SeqID_5671
gattcgactttagatctgagtgagaagaagcagagccatgacgatgatcagatccatctcgatgctaacgttgctcgtcacactagctgcatccatctccatggtctcctccgcttcatccgcagactttgttaagaagactatctcttcccacaagatcgtcatcttctccaaatcctactgcccgtattgtaggagagcgaagtctgtgttcagtgagctgaatcaggttcctcatgttgtcgagcttgacgaaagagaggatggggggagtatccagagtgcacttggagagattgttggaaggcgaacagtaccgcaggttttcattaacggaaagcacatcggaggttcagacgatacagtagacgcgcatgagagtggggaactggccaagcttcttggcgtttccgaaagtacaagagctgaactctaggctgatatgt

SEQ ID NO: 15451 - DNA, 553 bp, Glycine max
  Coding DNA Sequence Number=SeqID_5672
ttttcgttccgtacaaatggcgccgaagaagagtgacggagaagggaaggcgaaacctacgacggtgactacgccagtaaggcagactcgaagcatggatcggaagactcggagccaaactcggcatgactcgcccggtggcggttcttcctcctccaagctcttcaccttcgagtctcctgagaagaagaaaaggaagccgaaagccaaggacgctggaccggcgactaagaagatcaagcaagaaaaggaggacgacgacgacgtcgcggctgcaaaagaagaaggagacgacggcgctgagcacaagaggatcgtaatcgagcactgcaaacaatgcaaatctttcaaggagagggccaacgagctgaaggatggtctcgagatagctgtgcctggcatcattgtgactgtgaatgctgacaagccaaggcgtggttgctttgagattcgtgaggaaggtggtcagacgtttgtcagtctcttggatatgaagcgcccatttaaggagatgaaggatcttgatatggaacaggtcattgcagacatcgta

SEQ ID NO: 15452 - DNA, 505 bp, Glycine max
  misc_feature (78)..(78): n is a, c, g, or t
  misc_feature (108)..(108): n is a, c, g, or t
  misc_feature (120)..(120): n is a, c, g, or t
  misc_feature (166)..(166): n is a, c, g, or t
  misc_feature (247)..(247): n is a, c, g, or t
  misc_feature (268)..(268): n is a, c, g, or t
  misc_feature (313)..(313): n is a, c, g, or t
  misc_feature (336)..(336): n is a, c, g, or t
  misc_feature (343)..(343): n is a, c, g, or t
  misc_feature (351)..(351): n is a, c, g, or t
  misc_feature (408)..(408): n is a, c, g, or t
  misc_feature (411)..(411): n is a, c, g, or t
  misc_feature (414)..(414): n is a, c, g, or t
  misc_feature (419)..(419): n is a, c, g, or t
  misc_feature (447)..(447): n is a, c, g, or t
  misc_feature (469)..(470): n is a, c, g, or t
  misc_feature (474)..(474): n is a, c, g, or t
  Coding DNA Sequence Number=SeqID_5673
acaaatgcgcgccacgcgacgcgatgcagtgtgtcgagatgtaatgaccacaacgactatcgtgcttgtagtgttagncgcgatctgcgcttcgcgctctactatcgntatgtgcgcgantcgttacgtttcgtgtgtgatatctcgagagcgacgtgcgtgtggnacgacgcacactaccacgcatgcgccgcgtatcgagtatcgagtagcgtctgctactcatcctactctgctactcgcattnctgcgctattgttatatcgtnacgttatcatcgactgccgtcatcatcgttcgggacagtacgccnggagtgacgtcgcgacactgtanagtcatncgtatcgncgtgcgtgcgtcgcgtgatgacgacacgacagctcgtctcgcaacatccgcgctgtntgntancgcancgcacgcgcgcgcggcgaccgcgcgtcntgtcacgtggcgcgcgtgcgtnntctnatgtacgaaagtgtcgcgtgtcggtccgatc

SEQ ID NO: 15453 - DNA, 569 bp, Glycine max
  misc_feature (328)..(328): n is a, c, g, or t
  Coding DNA Sequence Number=SeqID_5674
catctcatctacatcacatgttctctcagcataaacacaccataataacccagccccgcaacacaacctaacactacacacacacaccacataatcaacacatcgtaattatatacaacataacatatcaaacacaacaccccatacacatacaacaactaccatccatctccctctatcctccatcaccctcaccacaactcacatctatacaacttaacaccacttccacttcatacctctcacatccacaaatcaatatatattccacttacacacctccccacactatcccccatccacgactacacacaattccttacaatantacatgtcccaaatacacgcccaatcatatactatactaataataactaatacactctcctcatctcatcaacacacacaacacatatacccatacaatatcacattaatacccacacaaccctcaccacctctccacccctccaactcactcacgcccctgcaaccaacactactctactatatcacacgtattctatcctcatatcattaacagtagttttactcaatccatacataca

SEQ ID NO: 15454 - DNA, 455 bp, Glycine max
  misc_feature (336)..(336): n is a, c, g, or t
  Coding DNA Sequence Number=SeqID_5675
gaaggtatagcagctccggatctttggactggatagtggaagtcacgtaataaatgagagttggcggggggcggtgtgtgagcagcgtgaggattgatatagtatgggttctaagggtgttttttattatttattagaggtttttagatcttcattattgttgggctttgttgtgtggggtctctattcagctgcagggtattgctctttatcctaatcatgcccatcctaatagtcgcaggaatgtatgatttccactctctgcgctgctagtcgcgctacgacctatgtacgaccgcaccaagggtgtgtgatgagcaaaagagtgtactatangcaatcgaggtgagatggaggataagataagggcttgacactatattattggaaccattcagacgtaatgtatgcacggttgctcgcggcggaaggcctaagtacactaaccgttcgcg

SEQ ID NO: 15455 - DNA, 570 bp, Glycine max
  misc_feature (428)..(428): n is a, c, g, or t
  Coding DNA Sequence Number=SeqID_5676
attctcaatccccataacacataatataaatagctgctaaaataaatatggataataaatgttggcccctcggtgttgtggtgtgggatgtggaaattatataaaaaataaaagtgaataaaatgttgtggaaaagcgatgaaaaataatcattccgatcatacatcaaatattatacacaaccgacacactaattctataacatctaatattacattatttaacaaaagatatataaatagaataaacaacacacacaattaattacgtctattcagctcaaacaatgaaaacagtctcacctataacaacactcactatgtgattcaaacactacaacaacatataactacaaaaaaacacaccaatataaataatattaaactcaccataaccacctcaacctactacatacatcacctcacacntccatttatcaacacttccattacacactacactagctctcatacatcaaacattttgtatatataaaccaactcctgtaccgcaactccataatagcaacacattattcgacttatatctgtctcacagctctagacaact

SEQ ID NO: 15456 - DNA, 468 bp, Glycine max
  Coding DNA Sequence Number=SeqID_5677
cccaccacagcggagatatattgaggcgaataataagccatcgagactgagtatatatataagggacagtgcgaggaacgcgcacgcagagagtcgcgccacacacctacacagaagaagtcggcggatctcggcagacgactgtccaacgcgagagggcgtgcggccgcggacgggaacaagcgcgcgcgtcgtggcacgacgctggtcgcattacgcctgtatatataatgatatacagactgcagctgacgtgcgatgggagtgcgtgacactgtgatgcatcactgcataaggctgatgaaaagtgcgtggcagcactgatgcgtggcaaacgtgagtgcgaggtgggcacgcgcacaggcacagctgtgacgctgagcaggtcagcgggtgtgccgctagcggccctctggcgcaacgcgctgctatatgattattatctcggctgtcatgtcggtacaagat

SEQ ID NO: 15457 - DNA, 344 bp, Glycine max
  misc_feature (257)..(257): n is a, c, g, or t
  Coding DNA Sequence Number=SeqID_5678
tgcgccgcgcgggtttgaccaaaacccctcacaaacacatacaaccccgacagcacgcctgaaagagtgaagagaacaaacagagcaatggaaggaggaggagctgctccgccggccgacaccgtgatgtccgacgcggcgcctccgaccgcagcagcctccggtggcgatggggatcgagaatattccggcgacgctgagccacggcggcagggtcatccagtacacataatcggaaacatattccgaggtcacgncaaatacaagccacccatcatggccatcggaaaagggcgatacggaatcgtttggtcggctttggactcggaaaccaatgggcccct

SEQ ID NO: 15458 - DNA, 537 bp, Glycine max
  Coding DNA Sequence Number=SeqID_5679
ctcattgaaaagaaacctggtggcattattgctcttcttgatgaagcttgtatgtttcctagatcaacacatgaaacttttgcccaaaagctgtatcagacattcaaaaaccataaaaggttcagcaaacccaagttggcacgtagtgacttcacaatttgccattatgccggtgatgtcacgtatcaaactggattggtcccggacaagaaccaagattatggttgttgcagaacaccaagaacttccttatgctttccaatggcccctttggggctgggtttgttcccccccttcccctgaggaatcctccaaaaattcaaagtctcctccataaggtccccggtttaacaaccattgggagcactacttgaaaatttccgtgccccttggccccactacattttgttgtggaaaccccataatcttctctagccaccaatttttgtgattaaaaaagttttccaccacctccccagtgggggggtattgggggcaataagataaactgtggccgggatcccacttaggagacat

SEQ ID NO: 15459 - DNA, 459 bp, Glycine max
  Coding DNA Sequence Number=SeqID_5680
tacagagatgtgttggcctgatttaggaaccacgtatatagaatcatatcaaagatgacatgattatgattgtgtgaacaatgtgaattctaaaaactatgacgccgtatggctaagcattattgttaactggcggtgccatgggggaatggtctggcggatcttttgccaactgccataggcaatttatgaaggaaggctcgcttcggcagcgccataggccacaatggagtgtttgtatggcagaatattggttatgcgccattgataacactggcattataaaatataatattaacatgaaatcacattaattagaataaacgcatcaatgtttcataattcaactttaattatagtgaaaaataacgaaatgttattatttatctaatcattgtagtatattagtaaaaaaaatcaaaaaactgaaaaatacgagttataagtattccatagaat

SEQ ID NO: 15460 - DNA, 522 bp, Glycine max
  Coding DNA Sequence Number=SeqID_5681
aaagttcgacgacaccgctcaatatacctggatctcaattgacaaactctctttctggtattttgcaaggaacatcggctccagtaaatattccgggtagttcactaaataattttagtccaaacaatcattcgaatatgttcaatgtgtcagatccattcagtcatctgagtgacccagcgccaaaaattaacaattcctttggtcataatgatagtagtagcctatttttccaatcgcatttgatatcgcccagtttgggtgacacattatcaatgagccccgatctaagccggctatcggaaatcaatccaattcgcgatgagctttcaactggttcaataacaaatagtttattcgaaaatagtttgcataataagcaatattcgatgtcaccatctctattgaataattccagcctaagtgatatgaatcgtttgcgtgatgaattttcaaatcaatcgaccaaacatcttccgacaccatgggaagagcaaattgtacaggtctccaaagcatgcg

SEQ ID NO: 15461 - DNA, 411 bp, Glycine max
  Coding DNA Sequence Number=SeqID_5682
caaagggtccttggttatgcgcaaattttgttcttttttgggaaagggggccggggattttcccagtagtttaccatgacgggttcacttttgaatattgaaaatttcaaatctgggaaagctacccttacgtgcccctaattaaagcatatgccaacactttaataaaaagggttgggttgatggagaacagctttcagaggtggaagccatcgcttacatagaaggtgctgctaaatcattgtaatttgcataggcgtgccatttattttaggtgtaaaatcttctagaataacttactcgtacaaaaaaagattctacttgtagatattgggtaactaaacctcatagtattgctacgagattctgcatatttctcctagttttggatgtgccgtgcgcagctacact

SEQ ID NO: 15462 - DNA, 593 bp, Glycine max
  misc_feature (291)..(291): n is a, c, g, or t
  misc_feature (301)..(301): n is a, c, g, or t
  misc_feature (394)..(394): n is a, c, g, or t
  misc_feature (472)..(472): n is a, c, g, or t
  Coding DNA Sequence Number=SeqID_5683
atggacggtgaccacggacaacgtagaaagccagagatagctcggagttcacccacgattgaaggcgtatgctcacacgtaccccacctcacatcttaggctcgtgtttgccccacactttcataatcagttatttttatttctacttaactcgcatcgtagaatctcacaccaatattctaattcattagtattatctctctcacctaccctcctcacccacacccaccacactataggcgccgcacccggcgcagaagtgcgtgtgaaagggaggatagggcgaggagngccgtcgatnccctgcctactagtgtaatgtcttcgtcgagtacgtgtgggtaagctatagccagagaggacctagttctcaactagtgcgcatgcaaggaanaataggcctgcacacccgcctctcctcctccctcgtcctccggccagcccgcgccgcggcacacacagtaacagcgtngaggagcacagccgccccccccagcccaaccaacacaaaccacggacacgaacggcacggaagggagaagagaagaagagacgcagcgagcacggccagcggcgcgaacaccacaagagga

SEQ ID NO: 15463 - DNA, 421 bp, Glycine max
  misc_feature (236)..(236): n is a, c, g, or t
  misc_feature (246)..(246): n is a, c, g, or t
  misc_feature (261)..(261): n is a, c, g, or t
  misc_feature (390)..(390): n is a, c, g, or t
  misc_feature (396)..(396): n is a, c, g, or t
  Coding DNA Sequence Number=SeqID_5684
atgcgcgtgtctatatgtggtgtgagtatatattattgagtttgcatccgcactcgtggcacagtatgttgtatgacatgtctctttctatattgttttgcttcctgtctctctcgatgtgtgtgtggtggtagctggtggtcgcaatattatctgtgtgagtggtgtagctgccacgcgactgtcgctctcttattgccactatgcaacagtagatgtgatgttgtatagtatangcggtacatntctgtggagtcacanaaataaacaacaaatcaaacataccacgagatcatatacatgagagtgacgacatgagtgtgtacatagcgcatatgtatgtaggagtaaacaccgttcgacgacctgcctcgcatcacatcatcaatntatatngtagcacgccgcacgttggtgttct

SEQ ID NO: 15464 - DNA, 397 bp, Glycine max
  Coding DNA Sequence Number=SeqID_5685
gcttgtatgtgcctcatgaaaaatttgcaaaggccttttgggaaggcttttctttgcaaaaacatgccctgctcgccgcggcaattggggttgggctgccaagcctagttgccccaagggaaccacctttggtgtttttttaaagccttaaaaaagttccctcgagcctgttttcttggttgttcccccccctgagccttttgggaagggcaagtgtggccctaattgcccttgcccgggctgcccctgtggcccttaaggaatttgtttgaaaatgtttttcccctgtgtttggcaatccaaatttcccaataaggtatttttcgtttgaataaatgtgggggctgttttcctccttcaggtctgggtagtcatcccgtttgaatcctttcaagtt

SEQ ID NO: 15465 - DNA, 464 bp, Glycine max
  Coding DNA Sequence Number=SeqID_5686
ttgatgccacagacacaccaacatagatgatgtgttgcctctcctggtcgacaaactacaagcgccctatggcgatctgcacagaggactctgatggctgctatacaaaattttctgactgcgcatccaggataatgttgctactgcagcagcttgtaccttttttgaccctctttactgaacataacgtaataggcagggccacccctggatgcaagtctaaaccctgcccatgttagtgtgcaacaatccttcgcttttccgcgttgaggcgctagtttagatgttcccttaccccgatgactaccatgaactaacaactcattcttttctgaagtgcgcgctttattaacacgacgcctttcacggctgtattaccccgtatccgggacctttccatactcaccccccccccaaggagggggccccgagtaaccccatttccttcataatcactacaaccc

SEQ ID NO: 15466 - DNA, 236 bp, Glycine max
  Coding DNA Sequence Number=SeqID_5687
aaagacgatggctccttaggaagctggcaattgggaggtactgtctctgacctcactgatttagagggaaacagtgggctctgcaatgtgggaggcaataacatattgggtgaacctattttggtgggcaacttggatttcggaatctcttggctatatgatgctgctaagaaagtgttgtagaagttccagctaagtgatcttccggaaattaactgcttacttattactcaaag

SEQ ID NO: 15467 - DNA, 554 bp, Glycine max
  Coding DNA Sequence Number=SeqID_5688
tgagagctgtgaatctatgtggagattgccaatcactgatgaacatagagaagacatgagatcaactatagctgacctgaataataaaggaagatctgtgtcaggaggagcttctaaggctgccgctttcttggaaaactttgttgaaagaggcgtcaagtgggctcatattgatattgctggaacaagctttagagaaggtgaaaagtttgtgtacagcagtggggctactggacatggagttaagcttttgttgaattacctcaagaaaaagactcaacaataaaaataaaagctagtgtctgatgttacgattctaacatcaaaaattgataaataaataagacttacttaccaaatgtttaaagttttttttatttataacattgctaattttttaaatcttttgcatagagcttcaatattgaagctctttgttatttaatatgtgaatgtactaactatataaattccctcactctctctgtttatgctcttaaaaagtctatcatagcttcttttactatgaagctggactgattaactagagttat

SEQ ID NO: 15468 - DNA, 511 bp, Glycine max
  Coding DNA Sequence Number=SeqID_5689
gagataacactccttctgcctacagtgcttccaaaaactactcccaaactttttctcccaacagaaacaatatgagcagccctcaaagaggaactacctctatgatccacagtgaacttgatcgtttacgtcgtgctaacgctgaactcagtcaggagtttcaaaagaatggaaaggataaaaccactctttatgaggagagaataagcattatccaagctgaaaatagaaacttggaaaatcttctcaacgcctatgctaaagatagagaacttcttaagcaaaaagatgccaagattgcagacttagaaaacagattggtccttgttgccactgaaaatgaaagacaagcctctgttatcgccaagttagaagaagaaaacgaagaattaagagccagatgctctgaacttggccaagttcagttcttattaaatgaatctcagtccaagattaacagactgaactctgaagtcgaaagattgagcgcagcagctgatgccaacagcag

SEQ ID NO: 15469 - DNA, 483 bp, Glycine max
  misc_feature (37)..(38): n is a, c, g, or t
  misc_feature (52)..(52): n is a, c, g, or t
  misc_feature (69)..(69): n is a, c, g, or t
  misc_feature (78)..(78): n is a, c, g, or t
  misc_feature (93)..(93): n is a, c, g, or t
  misc_feature (126)..(126): n is a, c, g, or t
  misc_feature (128)..(128): n is a, c, g, or t
  misc_feature (140)..(141): n is a, c, g, or t
  misc_feature (143)..(143): n is a, c, g, or t
  misc_feature (146)..(146): n is a, c, g, or t
  misc_feature (158)..(158): n is a, c, g, or t
  misc_feature (162)..(162): n is a, c, g, or t
  misc_feature (181)..(181): n is a, c, g, or t
  misc_feature (183)..(183): n is a, c, g, or t
  misc_feature (197)..(197): n is a, c, g, or t
  misc_feature (257)..(257): n is a, c, g, or t
  misc_feature (314)..(314): n is a, c, g, or t
  misc_feature (378)..(379): n is a, c, g, or t
  misc_feature (404)..(404): n is a, c, g, or t
  Coding DNA Sequence Number=SeqID_5690
ggcacaataacgctcgccactgagcgtgatacgtganncactgctaccatcnccgagacacgtcattcnttgcgctcnttacgacatcggctngcgcctgcgcgtggcgcccggctccactcccgnantcgctctggatnntngcnagatagacacgngcgnatgtagtgtgtttggtatncngctcgtgttacagngctcgttcatgtatgatgtattatatctctgtttctacttgttggtatatacatattgcnaatagctcacccatctcacgcctgttatctcttgtaggaggtgcgacaaaaaaacantacagatccaatgggaagactagcaggtaaagagaacgatgacccagatcatgtgttgtgtgtnnactgcgcctcccctcactactctcntgtgtgggtggacagagcggcggttgtctcgtgctgttgagttgtcgcttacgcttctatcatgtgactagtattcgga

SEQ ID NO: 15470 - DNA, 551 bp, Glycine max
  Coding DNA Sequence Number=SeqID_5691
tgccaagaacatagactgcggtgggaagtgcaattacaggtgcagcaagactagcagacacaaaatgtgcataagggcatgcaatagttgctgcaagacgtgcagctgcgtgccaccaggcacttctgggaaccgagatatgtgcccttgctatgctagcctcaccacacatggaggaaagctcaagtgcccatgatgagtcgatcacacatgcttataataattatgaagctgatcagagtctaagattagatacctaatagtatttatctcaccatatgcgtgcagtcaaattaataaatgcaatattattttgtctcaacgtaactacgtggtaatatggtctgatcgaggaatgaagcaccgagggaagaacatacatagcaccaaacgagctgcttaattggctagcaaagtgggaaaatggatgatgactaagatctgatattgttgcggataaatatatatatatatacatatatatatatatatatatatatatatatatatatatatatatatatatatatgatattgtttttatgctgcaa

SEQ ID NO: 15471 - DNA, 150 bp, Glycine max
  Coding DNA Sequence Number=SeqID_5692
tcttttttgttcaaaacaaccactgatataaaacatttacaaccatttgcactccttaaagttatcgtgagttttagtcgtttctggatgcgactctttctgggggctccttttttattattattgcttcgttttcaattgttattagga

SEQ ID NO: 15472 - DNA, 381 bp, Glycine max
  misc_feature (354)..(354): n is a, c, g, or t
  misc_feature (356)..(356): n is a, c, g, or t
  Coding DNA Sequence Number=SeqID_5693
cgaggtacttacttattcacacgcctaatttctttttttgaagaaatatctcaatgtaacgggcccttcatgatccttagtccttactactcttttgtgtgtctatgtttgtgttacaaaatatatctggttatgagttggctttgactaactcaactccttccttaaaaaaaaaaaaacagaaataacccataaggataactattgaaaaatacttaagtctaaaaataaagttaaattaaaatatataaatgaggagcacccttctcaaagctaacttttggggtggaattaggcctctcacattattctttctaagaatacccctgagagcattcatgatattcactcggntntttctgccactattaatgcttcaat

SEQ ID NO: 15473 - DNA, 600 bp, Glycine max
  misc_feature (142)..(142): n is a, c, g, or t
  misc_feature (213)..(213): n is a, c, g, or t
  misc_feature (292)..(292): n is a, c, g, or t
  misc_feature (313)..(313): n is a, c, g, or t
  misc_feature (489)..(489): n is a, c, g, or t
  misc_feature (544)..(544): n is a, c, g, or t
  Coding DNA Sequence Number=SeqID_5694
agagaaccaacagccgctgtagtgtgaggaataaatgtagagatatagagagtggagtgacgaatgacgtggcgcgagatcgaccaagagcgtacttaataaataacgcacgcacgggaaggagacgcgcgcgcggcgtatntgcggcaaaatataataataagcgggagggacgagagaaaatatatagcgccggccacgagcgcgcagaanatacatgaggaggagatacgatgcgagcagggctcgcgcgagcgcggcgcataatatgaacacaatcataataatgtgnggtgatataattgttgcagtnctgcgcgccgctgtgcgaggtggcgacagaatgataataggcgcgtcgtgtatggtgtgcagtgagaatatgcgtacacacgcgacgcgtatcaatgtgttctgcgggtgcatgattactgcgcgcgggatcatataacgctgctcaaccatatatatggagcgcatcctcgaccnctcggaaacgaatgtgtgggatattgggtaggacggaggcgcgcgcggtggtaanacgcaaatcccgagtgaatatgagcgatgacgagagccgcacggattttaatcgcg

SEQ ID NO: 15474 - DNA, 531 bp, Glycine max
  misc_feature (42)..(42): n is a, c, g, or t
  Coding DNA Sequence Number=SeqID_5695
aagctgtgcatattttccctcaaagagctttttcaaagaaancaagatatttgccatttggcgtgcacagtatgtctttctccggggcgcaccaagaggaatatacattctcaacggtatctatcgctacttaattgaccccctctttgcccattgaataacatgaatttcggccgtggtccaaacacaactcaatgctgttttcttctatcactattcccaaagcggaaagaccaccaaaaagcttcattggccagcataagtttattcttctgttcttaaaaccaaggttctaagtggcaattcacagtaagcagagaggattcccaaatttgtctggccaaggtggttttgattcacaaatgccaattggttgttttctccccacctcaaatactactgtactaatgactaggaagattatagacaaaaagcatcaatttgtttgtgattgtaatttgcaattttaacttgaaaaagtatttagatctagattgtggcacaatgcattttgatcttttactcttccct

SEQ ID NO: 15475 - DNA, 480 bp, Glycine max
  misc_feature (417)..(417): n is a, c, g, or t
  misc_feature (446)..(446): n is a, c, g, or t
  Coding DNA Sequence Number=SeqID_5696
ggttggtgatgttaaactatccttattttcattttgattgctggcgctcggattctttggtaaatgctgatttgatgactgttgttgattcggtggcgatgacgatgaattcgatgaattattcgcacatgctgcagacacaccacttgcggttgatgttccaatgccttgtcgaattgaagcagatgaaaatgtttgtgcgtgatgttgttgctgttgcattgtttttgatgagagtgatgccgatggggatttaatcaatcgtgacggacgatcacaccaattagtggacttgtcatcataaaatccatgatcatctaaacgttgttgaccaagtaaacggtctgtttctaaatcggtgtcggcctcttcgtcatcaacactcaacggttttgatggattgtgatcggaattaanactttcccgtgactgattatgttgattgngatgatgacgaggcagccatatcggtgagctttt

SEQ ID NO: 15476 - DNA, 444 bp, Glycine max
  misc_feature (283)..(283): n is a, c, g, or t
  Coding DNA Sequence Number=SeqID_5697
tccaatgatgccagttgctgatcgtgaaatggaaaaatacatttcacgttgtgttgtatgcgaaattccacaaaacgttatcacattacacagtcaaacaacatcagttccagactgtccatacggttgggaaggactttggcaaggatacagtttccttatgcataccggagttgccaacggaggtggtggtcaagcattatcaggaactggttcatgtttgcaagatttccgtaccaatccgttcattgaatgtaacggtggaaagggacattgtcacttntacgaaacaatgaccagtttctggttgttacacttgattcaagtgaacaatttacaaaaccattgcaacaaaccatcaaagcaggcagcttctattcacgattatccagatgtcaagtctgcataaagaaatagaaatgctgcatcagttgccgaaattat

SEQ ID NO: 15477 - DNA, 364 bp, Glycine max
  misc_feature (102)..(102): n is a, c, g, or t
  misc_feature (131)..(131): n is a, c, g, or t
  misc_feature (214)..(214): n is a, c, g, or t
  misc_feature (304)..(304): n is a, c, g, or t
  Coding DNA Sequence Number=SeqID_5698
taaacggctaggtgccgctgtcattcttgcaattacatatattagagtaaacatcgctcctcgccaccatccaatcccaacttcgtatcaccttcttttcanaagtcctatgttacaggtggcattatagnggtatcttgttcattaaatcgcgtcatggagcaaacagaaagaaaaggcagctgatcagtcccgaaagactagctgtcagtanactcgaagtctagttgttgatcgtgttgccgatgggacaatcattgatctaagcaacgccgcggtagacagggttgttctcgcgaagcanagtgtgatcgccattagtgtccatggtgtacgggttggcggttccctgaggagctccgta

SEQ ID NO: 15478 - DNA, 152 bp, Glycine max
  misc_feature (108)..(108): n is a, c, g, or t
  misc_feature (126)..(126): n is a, c, g, or t
  Coding DNA Sequence Number=SeqID_5699
aacctgcaaagagctcgagacactccgtgaatacttgaactgaagcaagattgatccttcaaagacccaagaacctttagggaaacttagcccctgattcaaaactgnctctgaccggatggtctnttaacaggggcccaaaccatctctga

SEQ ID NO: 15479 - DNA, 221 bp, Glycine max
  misc_feature (183)..(183): n is a, c, g, or t
  Coding DNA Sequence Number=SeqID_5700
ggcttttgattcatgggacctcgcattattttattgctcttcgcattgtaggtgatgctgcctgttgtcccttctttgactgttttatcgtgaatcttggtagggtgcctgtcagtttgtgagttgcatgatccatagtaatgtagttatgactgtcatcgttagtacgtttgctcggtagtngtatgtatcgactatcgtacgaattgacgaggtatcgt

SEQ ID NO: 15480 - DNA, 587 bp, Glycine max
  Coding DNA Sequence Number=SeqID_5701
tccttgtcgccacaactcaaaaatcttatactcatcctataaaactataactaactctattcacatatatatatctaatcgattacatacgcaaatatgcatatatgagaaagtggacggtcatggctactgatctctataaagtaaccatcattctcatagtcgcgtaggacacgccgagctcactacgattatctacaatctatccacacatgctatacgaaggaacagaatatatccctctctatcatgccagacaacggcgcaccgaggagaagactatatgtgataaacatcaccctccagtcacattgtcgtgtcagcaggagatggagacccacgtggcatatagtgcagtcgacacgacaatacaaacacatcacacgtattcactctccacctctccactaagaacatacaaaggattcggtatatgtcattctcttatttctcttttccaagaagaacaggaaggaaaagtaacccctcattcaaaatgaagcgcctacaggtacctgcgaggcaagagagagcacggaatagaacaaatgcgacatatagaagacgaatacactctatagcgatca

SEQ ID NO: 15481 - DNA, 592 bp, Glycine max
  misc_feature (75)..(75): n is a, c, g, or t
  misc_feature (121)..(122): n is a, c, g, or t
  misc_feature (184)..(184): n is a, c, g, or t
  misc_feature (342)..(342): n is a, c, g, or t
  misc_feature (519)..(519): n is a, c, g, or t
  misc_feature (547)..(547): n is a, c, g, or t
  Coding DNA Sequence Number=SeqID_5702
atatgttattatctctgcacatcgctacattttgtatgccgtgttgcagcttcgtagagcaatatgacaccaacnctcatacaacatcaacaagtgattcttatatctgatattctctatnnttgtcacaaacactttgcacttatactgttgccatcactcctactgcgtccgctatatctanctcttccatcaccgctctcgatctgcggcgagcagcgtcggttacacactgacagcataggtatgccgctgtgtcttgctcgctccgctgcgcgtctctcgctcacatctcccctcatacgtcgagaatagattcgctctgttatcgcagacacacangtatacgagcgagtgtctcagtcataattgtatatgctattcgtcctctctcttgatgagtctcgctctgtctcgtcccgtgctcgcaagcgcagctgggtgtgaacagagtggtgtcacgtactttactcctccgcgatactgtctctatatgaacgcgcaacatacatgctctgntcacgcaactgaacacacagcggacagntggtgggatgtgaatcgcacaacagatggtgctctaactcctgct

SEQ ID NO: 15482 - DNA, 432 bp, Glycine max
  misc_feature (158)..(158): n is a, c, g, or t
  misc_feature (170)..(171): n is a, c, g, or t
  misc_feature (219)..(219): n is a, c, g, or t
  misc_feature (320)..(320): n is a, c, g, or t
  misc_feature (336)..(336): n is a, c, g, or t
  misc_feature (396)..(397): n is a, c, g, or t
  Coding DNA Sequence Number=SeqID_5703
taatgagcgatgaggttacacatatacagcaccagaagaaagcatgagtacacataacagaatctgcagcagataacaacaaccacacaatatagagacgcacttgtacttagttattctatattataatatataactcacatgttcatttatacacncaacacaagaanncagcaagtcctacgcaaaacaacacatcccaaataacaaccgcggcanaaatatcaatatagatagccaaccctaattcatcgttctagtaccgcagacgccagccgccgcgcccgcgctcactcgtgtccgtgctatatgtcctggcncaccatccctacatcnttgcgcccgcgcgcgagcgtcgctggagtgtagataagggtgatatattagaaggaattnntacgataggtgagtagtcaatttagtagatcgatt

SEQ ID NO: 15483 - DNA, 204 bp, Glycine max
  Coding DNA Sequence Number=SeqID_5704
cgcgcgctccaacgcagatcctggggttgactcgcctagcaacatatcagaaccggggtgtgacacttatcttcctttattcctgtgctcttctctcttggtttaatagtatacttagtgatgaaattcctcagatcccaatctatgccagagctcgtgatctcaagcatcttttaaatctgatgcaccgcaggtgcaacggat

SEQ ID NO: 15484 - DNA, 560 bp, Glycine max
  misc_feature (337)..(337): n is a, c, g, or t
  misc_feature (369)..(369): n is a, c, g, or t
  misc_feature (429)..(429): n is a, c, g, or t
  misc_feature (455)..(455): n is a, c, g, or t
  misc_feature (484)..(487): n is a, c, g, or t
  misc_feature (499)..(500): n is a, c, g, or t
  misc_feature (504)..(504): n is a, c, g, or t
  Coding DNA Sequence Number=SeqID_5705
ggagttgatacactacactatctgtaggaggataatgcagtgtgcggtttgatggcgaggctggccataggcgagcggtggtgaagaactacggacgatgggatcgagagcgaagtagcgacggagtgcacgggatgtaagagtgcgagggtggagagaatatcagcagtactgttgtgatgcggtatctgcggctgacaggcgctgtcgtgcgggagggcactgtacatagtaggtctgcttatgtagtgtctatgtatgtgtactatcactattcttaagctgtactataacatcctcgtgacgaacaggtgtagttctatacgtgtgtgatatnaggcgagcatgtagtgttgttaagaatatagntatataacctttgtattagtcgggggtgcgctctttattttactaagttgtgggtattantgctgtctttttctgtcggtgtttcnctgacacgtatctttgcctactatcactnnnngggtacgagaannaagntgactcatacaacaacactcactcatgttttaattctacgtaggtcgtgtgtgagt

SEQ ID NO: 15485 - DNA, 275 bp, Glycine max
  Coding DNA Sequence Number=SeqID_5706
cattaagtacgttggtcgtggaccttctgctgctactgccactggtttctacactttccatgtcaaagagcaagctgagctcgtccagaaagccatcgggaaggaacccatcagctgaaaaaatcttcatttttaagctgaactttgaataagaagtttcggtgaacaatgtgatacacaacactgacaaagtcttgtctttgcattttttttggccccgttgatttttttgagcctgtcttgtgttgcaggtttatacacatcatctcattttt

SEQ ID NO: 15486 - DNA, 504 bp, Glycine max
  Coding DNA Sequence Number=SeqID_5707
caacacaacattccgcatctgttcaccttcctccacaccgacccaccgtgcaacccacctccgtcccgtctccgccgtcgaagctccggagaagatcgagaagattgggtccgagatctcttctctgactctcgaggaagcccgcgtcctcgtggactaccttcaggacaagttcggtgtgtcgccgctctcgttagctcccgctgcggcggctgtggctgctccgggagacggtggcggtgcggcggctgcggtggaggagcagacggagttcgacgtggtgattaacgaagtgccgagcagtgcgcgtatcgcggtgattaaagcggtgagggctttgactagcttggcgttgaaggaagcgaaggagcttatcgaagggttgccgaagaagtttaaggaaggtgtgacgaaggatgaagctgaagaagctaagaagcagcttgaagaagctggcgctaaggtctcgattgcttaaagaatgtgtgggtctttttttgctgt

SEQ ID NO: 15487 - DNA, 558 bp, Glycine max
  misc_feature (203)..(203): n is a, c, g, or t
  misc_feature (327)..(327): n is a, c, g, or t
  misc_feature (508)..(508): n is a, c, g, or t
  Coding DNA Sequence Number=SeqID_5708
gcctacctgtcactcatgtaatgtagtctgtcgttgccttcgcgtcgacagcgatcagacacataacgcatagatggatgtatatgttcgatctattttcatattgcatcgtcggtgctgctgcgcagcgttgataggatgtcagtcgagtgcaggcagcggcacgccgtctgctgctcccgcgtacgctggattgcaccaanccgcttccggcgcgcagcgactagcgaggtgcaatgactatgtgtctaggcacgtactatgtgcgtatgccccttccgtgtcacagactcctcaccaactacgcgtgctatattatatattctntaaactgtaatgtattatctctctcttgtacactctcatatccatatatattatatgatacatatattatacggcgcagagtgatcgccgggagtccgagtcgcggcgtcgatgcgcacacatgcgcgatgactcgctagtgtggtggtgagaggtggtgtagtaaacgggtaggctagtntcgcgcgttgtggtgtggtgtgtagtgatcagaccacacaccagacagag

SEQ ID NO: 15488 - DNA, 556 bp, Glycine max
  Coding DNA Sequence Number=SeqID_5709
aatatccgccacattatatttcatgtgtggcgcgggtcgatgttattctccggctgccggccacgattgtcgcacttatccccctattcattgagagggggagaatcaaacgtacagtttaatttggggattaacttgtttttatatccaattcttatatttattaaataaggagcgtgcgtcaattcgttgcaataatgccggaccggattgtacaacagaaccgcgttgatggcggggggggggctagacgtgtcgcgggtttttttacgggcgcacaaattacaatataaaagagggggaatcaataaagtggagggtggggtatcgtatttactatttgtacgttataggggagggtcggggtacacgataagtataaagagcggattaatcgttgggggggcagtttgctaaatgattctctgctctacagctccctctgcggggatgggctcacccactccattattttcctatcatcgccgcggacgtgactactatttattaaaggcatcgctgcgggtcgcggttgatacaccaccgataaataggg

SEQ ID NO: 15489 - DNA, 464 bp, Glycine max
  Coding DNA Sequence Number=SeqID_5710
ggattccgacatagtactcaggcccaacggaggaggagacaatagcgagatgttcgcgacgatgttttcagtgtttaaagcgttcagtgcgacaccgtcggacatcatcatctagggataggtgaggggtacaatactcctcgcatggctgagtcagtccttattctcctagacaacttgatcaagaaggaggtagtccaagagacgctacagattccgaatccgcagtaatcgagcagtcataggcgttactgtagtcacttgttctggcgcatcttgtcgtgtatggttttggtgtatcggcctctccaacacagggggacggtggggcttgaacattctatgtttcatgtagtcctcgcccggcttccggtatacaaggtggttcatgtccatccggagttaggcgcccccagaatgacattattagcaaggggacgagttcctatccactgcgagggtca

SEQ ID NO: 15490 - DNA, 527 bp, Glycine max
  misc_feature (40)..(40): n is a, c, g, or t
  misc_feature (56)..(56): n is a, c, g, or t
  misc_feature (120)..(120): n is a, c, g, or t
  misc_feature (122)..(122): n is a, c, g, or t
  misc_feature (152)..(152): n is a, c, g, or t
  misc_feature (157)..(157): n is a, c, g, or t
  misc_feature (191)..(191): n is a, c, g, or t
  misc_feature (227)..(227): n is a, c, g, or t
  misc_feature (274)..(274): n is a, c, g, or t
  misc_feature (314)..(314): n is a, c, g, or t
  misc_feature (352)..(352): n is a, c, g, or t
  misc_feature (362)..(362): n is a, c, g, or t
  misc_feature (414)..(414): n is a, c, g, or t
  misc_feature (440)..(440): n is a, c, g, or t
  misc_feature (443)..(443): n is a, c, g, or t
  misc_feature (451)..(451): n is a, c, g, or t
  misc_feature (455)..(455): n is a, c, g, or t
  misc_feature (460)..(460): n is a, c, g, or t
  misc_feature (468)..(468): n is a, c, g, or t
  Coding DNA Sequence Number=SeqID_5711
ttgtctgtctctcatactgtgtctactatctacgactccntctagcactgcgcgcnctggtctatgacactgactcatagctggtgagcactatatactatgtgtgggcagtaacacacnantcatacctgactgctcatgcgtgcgtacgnttctntcaacacgcatcaattctacactctatgctctgngggatgttgatatatctcgctgctgtgctcatgtcntgatctagtactcatgtcaatgtcgtgctatcagtgatatgacggtntgtactaggtatcgtatacgagtagtcatctctctgctgnatcgattcagcgcagtgtctgcgtgtatctctgtctcntactatcctntcatgtgtgctatgctggcgagcgcagacactgcgactgataccatctacangagcatgcgcagtctctaactgtcanaancaaacacngtgncaacnatcacatnatcatcactatagacaaagtctatgtatactacctgcgcaactgcagctgccgatgact

SEQ ID NO: 15491 - DNA, 484 bp, Glycine max
  misc_feature (419)..(419): n is a, c, g, or t
  Coding DNA Sequence Number=SeqID_5712
gacaagtacttctctaaactctcgcctattcaagcaaaagttgccatgaagacgtgctgttgcctcgaaccaacacaaggattggatcgtatgagtagaatatcgctgcaccgataaaaacaacaagatagagtagtattagattgagattgcagaggctgtgttatacataatagggttctctacagtttatataaagttcaagaacagggacgctaactacttcgtatcatggtagctatcgcatggactggatggtagaatatatctagaacattctacgagctactaggttagcgtcagtgtctagagggctggattggattctgtcgggggaagagctcgttagacatcttgtattagtgtattctgtgggtgagcaaatgattgctttaaggagacataggcgacgtccttgntctacccattcataccccactagcgcggcatgagatgttgtgctcttataatctttatcgcgccc

SEQ ID NO: 15492 - DNA, 508 bp, Glycine max
  Coding DNA Sequence Number=SeqID_5713
agcgttaatggcttgatgctgatgagagaggtatcgcgctaaatagatatgggggcggcgttacgaattaatacactccaccgcgaggtgaatagataaatatttgtgtgtgtgaaccagtgtaagaagaagagttttggcttgtttttattatctatagtatccttttttgaaaactactaaatagaacccggaaacgttggccctcttgggggcgcgccatccggcgccgccgctcgcccgccgccccacggataggagatgagagtacaactaaatttctaataataggtgcattgtgttatgttgagtatcttgcttgcgatttgtaagttcattataacgggtcataccacacgccggcaggtgttgtcgtttctcctgtttcctcaggggcgcccattttctatcttgctgtgtgttttccgtagaaggggtggtaaaatatactaacatccattctagtaactcttatctccctatgattatcttcgtgcatttcacgcta

SEQ ID NO: 15493 - DNA, 575 bp, Glycine max
  misc_feature (28)..(28): n is a, c, g, or t
  misc_feature (171)..(171): n is a, c, g, or t
  misc_feature (219)..(219): n is a, c, g, or t
  misc_feature (524)..(525): n is a, c, g, or t
  misc_feature (529)..(533): n is a, c, g, or t
  Coding DNA Sequence Number=SeqID_5714
actccgtctgtgatctcagcatgaaganaataatagatagattgtggggtcacaccacccaacacaactctccgctagcatagtactagattagcatattaaatctcagatcaaatttaatgtatataatgtagattatattagaatatataatatataatctattataanatgaaaatactgggtcacctgtcgtcatgaacgcatcattaatcatancaaataataagtatatattactattaatcatggaaagaaagaaagaaatattacaggattcctcatctaatatatagatcctacacaggtgatattaatgttataatttatgtatatgctcgattatataaattaataaacttacaatattataaaatataaagtaatgaatgtgtattttaatcatatcatacatatactactctctacgagggcgaagactctgatttaaatcaataatattatgtaagaaattttgtcattattagacttgtcgcacttctgagaggggggtggggtggggnntgtnnnnntcaacataaacctcgaagacaaacggacactcatagaagaat

SEQ ID NO: 15494 - DNA, 155 bp, Glycine max
  Coding DNA Sequence Number=SeqID_5715
ggctaatgcaaattttgtcatgagcaaatgccttgaggctatggcacatgtggtgttgagcatatcccttgctgcacatgaaacttggatcttggtcttgcttcaaaataaagcccaagaaccctcatcccctattatatatttgtagtgcaagg

SEQ ID NO: 15495 - DNA, 562 bp, Glycine max
  misc_feature (193)..(193): n is a, c, g, or t
  misc_feature (356)..(356): n is a, c, g, or t
  Coding DNA Sequence Number=SeqID_5716
gcgggagtcttatggctttatcgagacggtgaagacaacagttacatattcctatacatagtacacgggaccaagagcgctagagcgacatacatttcagtgtccattcgtgctatatcgatgggacggggtcggatgcatatgtctgcttagacgtgtctaagcttgtcacacgcgcgtattctagtacatntgccgctgtctcgatttatgtattactattctcttgtgatcatgactgattagtagaaatctctagctcctcaattatgatatttaggagagcagagcgtcgaaatggtagtatttgacggccggtagcgttatatggtattgatatcgctatcttatatcgnggcggcgtgggaaggatgaggttcggcgactcaaacgcagttggcctctgtccctgtgtcggcgtcgcgggtgtgtgctatacctcataatgagtatctatggtgaggggcgcggcgtggcgcggtcgagatgaggagattggcgttatcatcagtatttcgtggcgctggctcgggttagacgacgagtctcaggtttctatgat

SEQ ID NO: 15496 - DNA, 525 bp, Glycine max
  Coding DNA Sequence Number=SeqID_5717
atatcataattagggaatccagcaaaagtgcccaaatggccataggcttacagcatcgtcggcaacgtggtctttatttgtggttatttgtagcattgtgagaaggagtagaggtgggaactcgtaggaatctttgcgaagataaaagattcgctggagaaagggttagaagaaaaatgtgattcatttggttttcatttacggtcgtcccacccataaacaattttgtagatgacgttttcactcacgttattgtgtttgagaaagacataatttatttagaggaaggtgcaaattcataactttattaatgttattgcatatgtatggatcattttcattttccatactataagaagattaatagggtctgtgttttatgtggattaatgactatggctgaaatttatttcttttgctattttgatttatgacaacattttattattatttttacaaaaatttcaagcattataacctttgagcaatagaaaaaaacatagtatgtttatttatgtctttgca

SEQ ID NO: 15497 - DNA, 559 bp, Glycine max
  misc_feature (256)..(256): n is a, c, g, or t
  Coding DNA Sequence Number=SeqID_5718
gcgtagattagagctcagagtcgaatgagaagagtagagaataggacgctgagatcgctacgagaggtgtgcgagtggggtgggatataccgagatgatatcaacgataatagagaatttgaaagagcgttggtgttgattgaggagatagacgagagagaggtatagaacattaagttttccttactgctgtattaatgtatctatatttatctctagtactcgtgcgtgtttatgtactacgcagcgcgcggcnagggattaggtagcactctataacagcacacccacatagaagccacttgccccataaggatgcagagcgtatgttacttgtatcgtggatatgatatgcattgcatatcgtgcaggtacgcgacgtgataagaagatatagaagagaagtaggtgctccgttgtgctgcagagaagaggaggtcgagggagtctcataaatacgataaatgtacttcttattatggtggtgagatctctgtcgtattcataatagtttgtggtggtgtttgttggggtgtatacactatagatggcacatcgt

SEQ ID NO: 15498 - DNA, 519 bp, Glycine max
  misc_feature (232)..(232): n is a, c, g, or t
  misc_feature (235)..(235): n is a, c, g, or t
  misc_feature (332)..(332): n is a, c, g, or t
  Coding DNA Sequence Number=SeqID_5719
cacgtcgcgacccatgtatatattgtgtgctgctcgcacccgccacaccgccaccacccggtcaaccacactactctacgcatcacatctcaccgctgccgtggtgcggtgagtaataactctaactcacatatactgcgcgatatacactcgtgtcattacttattcgttcggcgcgagagagatacacacctgagcgcgcacatcaatatataatatacataaaacacgncgncgccgagcactataatatgccgtttctcatacttctatcataccccatacgcatatactggtcgcgtacatataacaccactctacataacatctgnctagctgttatccgactatcaagcgacggacctctactcgctctacatataggtcgcgctccaataccactcgatctactacatactggtgttgctgtttaatacaactctgtactcttacccatctcatactcatcacactaattatctaagtgcggtgtcagttattatcacaacctgcggcgtc

SEQ ID NO: 15499 - DNA, 376 bp, Glycine max
  Coding DNA Sequence Number=SeqID_5720
agttgccaatttgcccttcaccaaacacgcacagcgacagatcgagaggccagagggagctgctgaaaattcaatgcgccaatcattgcggcgcagcggcaccagcaaccaggggctcatcatccgttcttctcctggcagtaaatgagcagtacaagttcttcatttctctctggaacttcagttcaatcggtgaagaaaagatgatattggcgagataatttaacaccggaagagggcttcacaaatcactgggcgagctagagagagggggggcgaggggaacaaaccaccactggaaaaaggccgcagaagagaagggggaaacaggagagagaaaggcgaggaacttttcgttggatccttcgcttttggg

SEQ ID NO: 15500 - DNA, 591 bp, Glycine max
  misc_feature (85)..(85): n is a, c, g, or t
  misc_feature (152)..(152): n is a, c, g, or t
  misc_feature (155)..(155): n is a, c, g, or t
  misc_feature (173)..(173): n is a, c, g, or t
  misc_feature (178)..(178): n is a, c, g, or t
  misc_feature (208)..(208): n is a, c, g, or t
  misc_feature (213)..(213): n is a, c, g, or t
  misc_feature (215)..(215): n is a, c, g, or t
  misc_feature (258)..(258): n is a, c, g, or t
  misc_feature (265)..(265): n is a, c, g, or t
  misc_feature (275)..(275): n is a, c, g, or t
  misc_feature (347)..(347): n is a, c, g, or t
  misc_feature (405)..(405): n is a, c, g, or t
  misc_feature (478)..(478): n is a, c, g, or t
  misc_feature (496)..(496): n is a, c, g, or t
  misc_feature (503)..(503): n is a, c, g, or t
  misc_feature (513)..(513): n is a, c, g, or t
  misc_feature (534)..(534): n is a, c, g, or t
  misc_feature (536)..(537): n is a, c, g, or t
  Coding DNA Sequence Number=SeqID_5721
acgacgtcgaccagcggagaacgcaatctcatctgatctagccataaacgtaatacaagatgacgctctctcctgtcagcactcnctactatcctgctcatctcacgtcgttgtgatgtgatgcagtgaactctgcgactattatagtgaanatnacacaaacaccagtatcnattanctagcgcgagacgtcattgagctgcgtganagtgnantgtgaacgtgagatgtcggcaatcagccacgcacgtagttgcnctgtagnatcttgcacncacacttgtagatgtcgacagtcgaaacgtatgggacacgtgtgagtgctatatgcctatgtcgatgtgtantgtatgctgtatatatcgatgtctatagtacgatagatgcgtagacgaatgcgacgcntctacaggacgactgacacgtctctatgcgcatgagcatgagacctccacaacgatgtctagtactcgcatantgacgtactcataggatngtgttcncagactcgtncctgatctacgcaatgactgnanngtacgttcgacatgctgtgatatatcatagtcagatactatcgtcgacgctagt

SEQ ID NO: 15501 - DNA, 460 bp, Glycine max
  misc_feature (108)..(108): n is a, c, g, or t
  misc_feature (400)..(400): n is a, c, g, or t
  misc_feature (404)..(404): n is a, c, g, or t
  Coding DNA Sequence Number=SeqID_5722
aacagtgaccttgacgatgcttgcccaccgaccacacgcgcggcgcttcgccccccggccgcagtcccgcacccctcaccgccacgccagcgcgccccgacccggcgnaccccgtcgatacgctttggcgcgctttctctaaaagcgaaaagaaccgtctcgacagcctcacctccgcttgctgccttcgtccgcctgctagcgcctaacagacccgcatgggttctcatggccagttgacgggaggtctgcctggtgcccgagcgtacaccagccatgaccgtgtgtactcgttcaacacaacacccacagcatgttgctcggttatgtttatccctctctcagtaaaatgtcggtcgtactcctcacaatattaaaataaatctgcggaccgactagngagntggggggggcgggggcgcgcggggggtgtgcgactctatttatcactgctgctttt

SEQ ID NO: 15502 - DNA, 367 bp, Glycine max
  Coding DNA Sequence Number=SeqID_5723
gtatctctcacaaatgcttcaggttttatccgattggctcatccgtcacaccggaggattccaaggttcggacctagcagctccaagtttcctcgggattcgagtctcaatgggagagttagctataagcctattgtgggtgggtatcccacagtgtccgtatgtttcgcacgccaaagtacgagcttacatgatgagccagagccccctttatggttgagccttgttagggacattttcgggagcacgggatcgctcttctcctttatggctgagcagccgagccagctgaaattcatagagtggcctagttttactaccacgctcaagactgccacactgagtctctttcttgtagctgttttca

SEQ ID NO: 15503 - DNA, 433 bp, Glycine max
  Coding DNA Sequence Number=SeqID_5724
taggccatttcatttttcgaacccatccagcctcaagtgttgtactacatgtgtgtgctcaacttgctcaactagtactccagtgtgtgtgagttcagctgttcgtgagtgcgagggagagtaagaacagcttgtgtgcagccgctggttagctaggcttcctctgttaaagtacaagtgagagttagttgcttgtagttctgggctaacagttagcttgtcagaaggcccttgcttttggccgtgatcttggtgttcacaggattcatgtggagttggactgcagcgaggcggtgagcttgatcaacggggctggcaagaatctctcggtggcgggccccattgtgcagcatatcagagagctcatgcttggttggcagggttgcaagatcacatggcggaggaggtctgcaaaccgagcttcccaaatatt

SEQ ID NO: 15504 - DNA, 322 bp, Glycine max
  Coding DNA Sequence Number=SeqID_5725
aaaaatcatggggtttgctgcgatttggaactctcatcccaagaagtacggtcctggttcccgcacctgccgtgtgtgcggaaactcgcatgggctaatcaggaagtatggtcttaactgttgtagacagtgcttccgcagcaacgccaaggaaatcggattcatcaagtaccgttaaagatctggggttgttgatgcagttgcagtcattttgtttttcttttaagcttttgagactttaatattgtaatgcatcttataaatgttctatggtttatgcaagacatttgaattgttgaacattttagcttctttcatccaa

SEQ ID NO: 15505 - DNA, 179 bp, Glycine max
  misc_feature (34)..(34): n is a, c, g, or t
  misc_feature (49)..(49): n is a, c, g, or t
  Coding DNA Sequence Number=SeqID_5726
tgacctcacatcctcaccgattggaatccgctgntcttctcatcctccnaaaaaaaatctaacagctccccggatctgatcctctttccggggctccaggccaaaaaagcccggggcccccccccaaagctcaaatcccagcccaaccttgagtctcaaatggcctgggataaccccta

SEQ ID NO: 15506 - DNA, 285 bp, Glycine max
  misc_feature (100)..(100): n is a, c, g, or t
  misc_feature (125)..(125): n is a, c, g, or t
  misc_feature (127)..(127): n is a, c, g, or t
  misc_feature (129)..(129): n is a, c, g, or t
  Coding DNA Sequence Number=SeqID_5727
ctacctagaattcagctcgaggaaaaaacactttcattgtgatgattgtcgtatttgtagactcggttttcgtgagaattattcccacttcagtaagagntctttttagctacacgaatgctctncntnataatcatttgtgcgtagagaactccatgaggcatcattctcccatttgttatgagtatctttttgactcattgaaaaacattactgttatgaaatatggtcacacaatgcatactcaatgctacctataaatgctaaatcgtgacaaatattttt

SEQ ID NO: 15507 - DNA, 497 bp, Glycine max
  misc_feature (189)..(189): n is a, c, g, or t
  misc_feature (259)..(259): n is a, c, g, or t
  misc_feature (275)..(275): n is a, c, g, or t
  misc_feature (311)..(311): n is a, c, g, or t
  misc_feature (420)..(420): n is a, c, g, or t
  Coding DNA Sequence Number=SeqID_5728
atacgtatatctctacactacgccgtgacgccattgatctactgtcacgtgcgtagtcattctgatattctcttccatctctcttctcttttcttacatcagccgcaaccgtgcctacacgctactgcactgccatctcacactcgctccgcctactactacactctactctctgtactttgctatgcnttcgacgcgtgctgatattattctatagatctcgctttgctgacatatgttgtctcttgagtcttctctngcatcgactatatganatatctctcttgttatcatgcgtcgtcgctcactcnccacgctgcgtatgtatgtgtgtgcgttatgctatggtattgttatattattatgtgtagtatatatacatatatatatgtcattactctccttatgtgtcgcgtatgnatgatcacactactgatagaatatctatagactaatctgacgcgcgcgcggcacgccggatgtgagcaagatgatct

SEQ ID NO: 15508 - DNA, 532 bp, Glycine max
  misc_feature (264)..(264): n is a, c, g, or t
  misc_feature (332)..(332): n is a, c, g, or t
  misc_feature (489)..(489): n is a, c, g, or t
  Coding DNA Sequence Number=SeqID_5729
gcacgcaccactatcaattgttgagatgtgggataggaataacgtcaacggacgtcggcgtctaatgtagttaggaccgcctgacccgcgcaggggtcgtttagttgtgagtgggtgagttaagaccatagctaagtataactcgcatccgacacgggaccaccaagcgaggcaacgtggtggacagcggcgtgaaagggagtgagtgcgataattgcgtgaatagagggggaccgtcggatgagggggccgcaaagagtatgnggagagaggggtagagaagatgcacataataaagctatatttaatgtaggattggtctactatattantaggtgtgggtgatgcgaacgtcccagggtctcaggatgaataaaatgtgtggaggggtgaggggtggcggagctagggccaacacgcgaagacagagaccgcgatattatagtgtgggggaggggaggagggggcaccctaatacgcgataacgcnggctcgccgcgggggagagagccctcgccagagaactatgaag

SEQ ID NO: 15509 - DNA, 422 bp, Glycine max
  misc_feature (41)..(41): n is a, c, g, or t
  misc_feature (64)..(64): n is a, c, g, or t
  misc_feature (111)..(111): n is a, c, g, or t
  misc_feature (149)..(149): n is a, c, g, or t
  misc_feature (163)..(163): n is a, c, g, or t
  misc_feature (189)..(189): n is a, c, g, or t
  misc_feature (203)..(203): n is a, c, g, or t
  Coding DNA Sequence Number=SeqID_5730
ctacagcgtcatttgaagggcttcaaccttccactgttcantttgcttccacgggcagaattanaattggcaatctctcccaaaggtccttccagggcttggttgtcaaanccaccaccgttgttgcccccaaatacactgcgataaancctctgggagatanagtgctaataaaaattaaagaaccanaagagaaaactaanggtgggattttacttccatcaactactcaaacggaacctcaaagaggttaagtagttgctattagaaaaagaaagacagtttggaagaacaatgtagagattagtatgaagactagtacacaaattttttatttcgaatattcagttgctgagatagacttcgatagttctaagcatcttattgttaaaaataatgacgttgttgtgttgctgcgaact

SEQ ID NO: 15510 - DNA, 179 bp, Glycine max
  misc_feature (124)..(128): n is a, c, g, or t
  Coding DNA Sequence Number=SeqID_5731
aattatcaaattagctgtcacagttgcaatagtcaatacgcctggcaaacccttatcacttatgatgcctgcatacgtttatgcctacaagcatgggcaaaaggctgcactgaggccccagagnnnnnaaaagatgagtgcctagctctccgaagtgcttttgggtgggttccattttg

SEQ ID NO: 15511 - DNA, 290 bp, Glycine max
  Coding DNA Sequence Number=SeqID_5732
ttctcctgaactttctccttcttcttcactctttctctgggtttctttctggatttgaaggctgttggatcatatttcttctcaacaatgcatggctatttatagaagatatcttgcagggaaattagccaaggcaagctgcagctcgcctaggcgaattgtgtggcttaatggtgaaggcatccacttgcccaagcgagttgcttgcttagggctgaagttacatccaacttgcttgggcgaatttagggtcggaaacctttgtgaagataccattttgcccttccttt

SEQ ID NO: 15512 - DNA, 324 bp, Glycine max
  Coding DNA Sequence Number=SeqID_5733
ggatggttctttttcttgagcggccgctcctgtccacggtctccttgatctcaggatctgctccttccccacgcctgcccacgaggacaaggaggcatggcggtggccactagcagcgccaggaggttttaagctcaggtgtcatgtgtggtgacgagctcatcatcgcgggattggtcacgttcggatgtgttgtgatcaagtgaacaccatggccatcgccggtgatggtgggaaggaagataagcacgtcagatcgggtgatgtgttgaaattgatgacttggacctgctggcagtcttgagtcatgcttattgggctaaa

SEQ ID NO: 15513 - DNA, 487 bp, Glycine max
  Coding DNA Sequence Number=SeqID_5734
gcacgtcggcgttcatggccatggcgccgctaccagctgttgctatggccccctcgccgtcggggctcaaggacgacaaaaggcgtgtgccgacgggtgcaaaccctttgcacaacagatgaggcgggccgcaggatcgtggcacgcacagcgaagctgctggtatcctgggtgagagggagatacagtgcgtgtatcattcagagcatgcaggctgatcaactcgcgatcgacattcgacagtgctgcgagactccgtaagcttctgattctacctcttttcttctccgcgccaagccgtgaagtcatcgatcaattgatcagctgggggtctggtcgaggagaaaggaagctgaatgagaagggtactgggctgcgcttgtgttagttagctaggtatagtacgcccttgttgttttgtagcagtatggcattcttgatgcttcaagtaaaaacattcatgtaatcatttgttgttttcgccctc

SEQ ID NO: 15514 - DNA, 578 bp, Glycine max
  misc_feature (135)..(135): n is a, c, g, or t
  misc_feature (192)..(192): n is a, c, g, or t
  misc_feature (197)..(197): n is a, c, g, or t
  misc_feature (224)..(224): n is a, c, g, or t
  misc_feature (270)..(271): n is a, c, g, or t
  misc_feature (317)..(317): n is a, c, g, or t
  misc_feature (342)..(342): n is a, c, g, or t
  misc_feature (383)..(384): n is a, c, g, or t
  misc_feature (504)..(510): n is a, c, g, or t
  Coding DNA Sequence Number=SeqID_5735
gaggaatacaaatcacaccatactatactctctcggggacgcacacaacacaccgaccacacaaccacactcaaaaacatcaaaaacagagacacgacacacactataacgtagaaacagagtaataccaagtanacaatatgaagagagaaagagaggcagaggtcgcacgttgagcatcgacaaatgccnccagncagctcgtggattgtattatctactgntgagatgccagcggcatcgtatcatctcgttcgacacacaagatanntaactataggtggtggacggagtaagcgatagagggttagaagaantatcataacacacacacatacttcntatttcgtgcctgacagtatagggacactacagaggcagcnncacggctgtggtacgcatcgtatatatagggttacagatctcgtgaacaaatattttccatatcactgttgtcgtttggttgattaacccgccgtgtggggacaaggaggagagggattnnnnnnnttacatcgaatatcactcaatactctcgtcgcataagtgcgacaagcattatttgttctaccctacat

SEQ ID NO: 15515 - DNA, 517 bp, Glycine max
  misc_feature (231)..(231): n is a, c, g, or t
  misc_feature (248)..(248): n is a, c, g, or t
  misc_feature (256)..(256): n is a, c, g, or t
  misc_feature (328)..(328): n is a, c, g, or t
  misc_feature (357)..(357): n is a, c, g, or t
  misc_feature (438)..(438): n is a, c, g, or t
  Coding DNA Sequence Number=SeqID_5736
gcggcaccaggcagatttagttttcaccagtgctgcatcagaaaacccattattcttgaaagaacatgtcaaggactttcctcctgcaagtcaagaagttggaggccggcgctttttcattgatatctctgttccccggaatgtgggttcatgtgtctcagaccttgagtctgtgcgagtttacgaggttgacgaccttagagaggtggtggctgcgaatgaagaggatcnccgggtagaggcggtgnagggacangcaatcagtggtgaggaaggtgagcaattccagggttggagggactcactggaaactgttcctactggtaanagatggagggctgatgctgaaggaatcangcttggtgagcttgagaagtgcttatgtgggatgggtgatgatatacgagagaaaacgcgcggagctgtggatgacgctantcggggtatggtgagataagttcgtcatggtccgatgcaacaggtagtgtgtgatgtgaacaacaacccgagctcttag

SEQ ID NO: 15516 - DNA, 466 bp, Glycine max
  misc_feature (117)..(117): n is a, c, g, or t
  Coding DNA Sequence Number=SeqID_5737
aatgttgtaattctagcctatctgtgtccacgtagcctcttggcctctaggctcatgatatcatttcagctgtagtggggttggttgaagatttattggtaagtagtgttttgtgcngaatctggagtaacgagagctctgttgttgaggagatgtgtaggcggagagagtaggacgagagcgcttacagcgtgtcggtgcgggtgggatgattggggttgggtcagagaaggtcatgtatgctgagtgtaagatagtgggagaaggtgagagagggaggataggtgttgagaggagcggatgtagccgcgcctgctgtgcaaatacctagcataatgtaaagaatggtctagaagtgacaattggggtggaagtgataaagacccattatttagaaagtgatatggtagttagcgtaaattctgaggagaagatattagtctgaggaggtgtgtgttgttctctt

SEQ ID NO: 15517 - DNA, 362 bp, Glycine max
  Coding DNA Sequence Number=SeqID_5738
tgtgggagagtctcttagcttcttcccatctcttgaattcgtctcctttcaaggcgagtctttccttttcagtcatggccatgtatctaagtctgtctttctcagagaggttgaattggtttccaccatagttggtgtagttgccagagtcgaatccacttccactggagaatctttgggcttcttgccatctcaagagttcatcacccttcaaagcaagtctttctttttcgctcatattcatgtatctgagtctgtcttgttcggaaaggttgaattggccgaattgattaggatgaacgtggccaatattgccaccgtagttgtagccacctccagagactcttctagcttcgtgccat

SEQ ID NO: 15518 - DNA, 552 bp, Glycine max
  misc_feature (69)..(69): n is a, c, g, or t
  misc_feature (147)..(147): n is a, c, g, or t
  misc_feature (198)..(198): n is a, c, g, or t
  misc_feature (383)..(383): n is a, c, g, or t
  misc_feature (393)..(393): n is a, c, g, or t
  misc_feature (511)..(511): n is a, c, g, or t
  misc_feature (519)..(519): n is a, c, g, or t
  Coding DNA Sequence Number=SeqID_5739
gaatcgagccatatctgtgcgatctagccatgtgttactagtgatgttgtcactgtcatcagccgcacnctcgacttaacacacatgagacatacactactcgcgctcacgcggtatccagatgtcgatgcgtatccatacctccgncgcacggcgatactgctcagtcgtgacgacttctaccactcatctatgtgnaattatgtcacagtcgtatactgcacgtgccgacgcacgcgacgtacagcgagatgaggaagcgatccatattccaactctcgtatagacacacgagctagaacgagcgacaaacggacatcacgtgtcgcatgcctctcacagagtcgcacacgtgcggcatatctacgatagatacaacagtnctcgatacantgatcgtcttcacacgatctgcgtactctgcgataggatcctatctgatctcagactctgatatgtagtctctctacgtctaagtgacgtgtgtatgattgactcgcacctgcataancactcgcncatcgcgcagtcacgcatgtctcttcatatcac

SEQ ID NO: 15519 - DNA, 208 bp, Glycine max
  Coding DNA Sequence Number=SeqID_5740
tactccttacagcattatgtatggtccagctatttgcggttacagaaccaaaaacgttcacgctattcttacctcccataacacataccatttgataaagaaggacgttccttgtgagactgaccaacttactcatgtggactcgataattctacatgccgatgcaacctacagaatcctgattgttgatgtgtggaagcatactggt

SEQ ID NO: 15520 - DNA, 145 bp, Glycine max
  Coding DNA Sequence Number=SeqID_5741
gccgacaatacactatgatgttagccgcctacctccacctcggagccaaaaactgcaacttacagatggaacgctacatcatgaagcgccgccacgacggaaactgaacttttctggaactctctttgatcatgtcggtaaaaaa

SEQ ID NO: 15521 - DNA, 391 bp, Glycine max
  Coding DNA Sequence Number=SeqID_5742
tagcaaccactctgagacggcgggccgcggagatggcagggtacagagtggaagatgactatgattacctcttcaaagtagttcttataggcgactccggagtaggaaaatccaatctcctatccagattcaccaaaaacgagttcaacctcgagtctaaatccaccattggggtcgagttcgccactcggacattaacagtcgagggtaaggtcatcaaagctcagatttgggacactgctggtcaagagaggtaccgtgccatcaccagtgcatactaccgtggagccgttggcgcactcctagtatacgatgtaacccgccgtgcgacgtttgagaacgtagaccggtggttaaaggagctcaagaaccacacggacccaaacattgt

SEQ ID NO: 15522 - DNA, 515 bp, Glycine max
  Coding DNA Sequence Number=SeqID_5743
gaacgcgctaggcaagatcaatcacaatcagaagacggcaaacagaagactactattaaagatctattatacataggaacaaatttattgaagaaagaacgagactcttacagaagaaggatctgaaaacgaagaagacttacaaggctctgaaggttcggaaggctcggaaggctcacaaaggctggtggcatggttcagaagggtcaggtwatacaaggatgttggtttcagttrkaaagttgaaggtagaagggtcaaatcttckaagctcaatgagtaaagactgttcaaacactccagttaaccagatgtccagagatgagccagatgggtcagatagcagcgatgggccagcggacaggtttcarggatgrgccagtggtcagattaaccagatgggtcagacgcctgcgytagtccgatgtgagctggaagagttggaagagcytgaggaagaagaaagcgtsctggaattraagatggatgggggaagtatcagacgaagctatata

SEQ ID NO: 15523 - DNA, 451 bp, Glycine max
  Coding DNA Sequence Number=SeqID_5744
aacagtcagtttaaatatgcgactttttgtgatgccaacattggggtttttgatgctgaaagcttgaggctcagatgtcgtattgcaccatcaatatgtttgtcaccggcagctttaagtggaagtcaaggtgggtatcctcttgtggttggcgcccatcctctagaacctaaccagtttgctgttgggctgacggagggatctgtcaaagtgatagacccgaccgaatcagagggtaagtggggacccctcccccccttatggccaatgaaatattgaagggtagggcgggttcttcttttacaccaagcacccccattgttgttcaggttcaaaaataagttcaaaggttttttactaggttattttccttcggaaatggaaccagtttaaaggtttgaatttgatttccccaaaaggtttccttcaaaattaaggcagttgggcaaaa

SEQ ID NO: 15524 - DNA, 517 bp, Glycine max
  misc_feature (40)..(40): n is a, c, g, or t
  misc_feature (145)..(145): n is a, c, g, or t
  misc_feature (211)..(211): n is a, c, g, or t
  misc_feature (273)..(273): n is a, c, g, or t
  misc_feature (280)..(280): n is a, c, g, or t
  misc_feature (388)..(388): n is a, c, g, or t
  misc_feature (398)..(398): n is a, c, g, or t
  Coding DNA Sequence Number=SeqID_5745
tcatatatctactcctgtgctcgtatgtgtcctacgcatntgctacgtcgcgcactatgtgtcagctctgcgctctcaaccgacacacactaactacgtcgcctcgtatgcacacacccgctcacgcgcacagccgcactagatnctactcatatcatacacgcttcatctcctccgcacatctcattatcttgacgtacatcatcgcatncgccctctactcactcttcatatcgctctgtaccctatctcgaatctctgcgcgacaggagnatcacgncataccgtttatatatatatgtatcatcatgtacgcatcgaagtgataatcgatatgctctatttcatcatcatacgactgcacatcacggatggagatcatcgactnctctcaacancgctcaactctctgcactatcgctatgtcctattaatagatacctactagacagatacgaacaacacttatagatgagcagtggctagatactatactcgatacatacgacgtcgtcac

SEQ ID NO: 15525 - DNA, 349 bp, Glycine max
  misc_feature (322)..(323): n is a, c, g, or t
  Coding DNA Sequence Number=SeqID_5746
ggcggccggtctataactattcgatccccccgcgctgcctgaatgcaggcaccagcgaagggacgctagacacatgacacagacaagacagtgccggagagagtgagactgaaaccgatatagactttgattactagcctagatgagacctgagttgtggtgagctccatcgatgacacaccatgtgcttgtttgctaacaatgaggttcaacgcatgcctgagaggaacatacgatcgctgcccgaatgaatggaatggatttacaagctcacagatcactgacactgtgggatcattacgggaaaaaaggtgaagaatcnngatcgtacgaacgctttatattccta

SEQ ID NO: 15526 - DNA, 513 bp, Glycine max
  misc_feature (32)..(32): n is a, c, g, or t
  misc_feature (76)..(76): n is a, c, g, or t
  misc_feature (82)..(82): n is a, c, g, or t
  misc_feature (131)..(131): n is a, c, g, or t
  misc_feature (156)..(157): n is a, c, g, or t
  misc_feature (169)..(169): n is a, c, g, or t
  misc_feature (256)..(256): n is a, c, g, or t
  misc_feature (299)..(299): n is a, c, g, or t
  misc_feature (327)..(327): n is a, c, g, or t
  misc_feature (488)..(488): n is a, c, g, or t
  Coding DNA Sequence Number=SeqID_5747
gacacgcagtgcatgctcagacattaccctgntagcgcgaaccacacaccctactatgcgcctcgtctctcatgcncccgcncacccactccggcactcctcgcttcatatcccacagcattcttctcgcncgccggcatcacacacgctgctcanncatcacaccacnccctgccaacacaacacatacacgccatcgcacacgagataaacgcatcggcctgtctgtatcacacaaatgacatttatgtcggcntcaccgactaccacatatgctaactgtataacataaccaacangtgcgttccctcgtagtgtctcttacancgccctctctctcccccactatactcctgccttcactctcatcactattcgctatctatcacatccctctcagcgtctgcacacacgtacactaactctcttcactcataatcaatcaatacagtgctgtcatatgaatagaagaaacatatataccacgntgtcaacgacaatacaccacatcac

SEQ ID NO: 15527 - DNA, 114 bp, Glycine max
  misc_feature (51)..(51): n is a, c, g, or t
  Coding DNA Sequence Number=SeqID_5748
acacatggtacaggtaacacccaacaggtcaagagtaagacccccattccntcacaatcacggccaaaatcttttaagaacactgaagggcccctaagaaaaatggcccagaag

SEQ ID NO: 15528 - DNA, 418 bp, Glycine max
  Coding DNA Sequence Number=SeqID_5749
ccccgtatggctgtcgaaatcgacggctggcgcgaccagcccatcgctggcgacgaggtgcttcagtgcagaggatgaacagcacgctagctcagtgactgagcttcgcagcgaaaaggtcgacagagagcagatggcgcgtgacatggaagccatcaatgaagctcgccgtgcagaggccgaacgtcgcgaggctgaagaggccgctgctaaggccatcaagaatggtgaggaagctgtagtcgccgagaagaaagaagctgggcccgaagttgtttctttcatcatcaagggtgatgtgtctggctctgttgaagcagtcatcgactccgtctcggcactcggcaatgcagaagtatcaacgcgtatcctccgccacggtgtcggcgcgccatctgaatttgatatctcgcacgcc

SEQ ID NO: 15529 - DNA, 414 bp, Glycine max
  misc_feature (119)..(119): n is a, c, g, or t
  misc_feature (121)..(123): n is a, c, g, or t
  Coding DNA Sequence Number=SeqID_5750
cagcattgtctcattgtggaagggaaagcacttgaggacgttcgtacccttgtttgacaacacattcagaaggaagattttttcccccccccccccggagggaagcaggggggggattncnnnattcttccttaaaaaacctccccccccaaaaagacaataacaccccaaacgctgggagggccggggcgtccctcgataaccgccacaggcccaggacccccgaacatggggggatactccccccccccccccgaagggcttattcgtggacgcagaaaaagagacccagcacacacccgcgtctcctctcgacggggtaaagatatttccaaaagagcataagacggtttgctcacgggcgcgacgtggggctatggacgagaggttaccgcaacgaccaaagcgcttcta

SEQ ID NO: 15530 - DNA, 551 bp, Glycine max
  misc_feature (118)..(118): n is a, c, g, or t
  misc_feature (461)..(461): n is a, c, g, or t
  misc_feature (503)..(503): n is a, c, g, or t
  misc_feature (505)..(505): n is a, c, g, or t
  Coding DNA Sequence Number=SeqID_5751
atatctcatatcattcactacccacccacattctactttgttaacacaccctctcactctgtcttcccggtatattatatacacacacatgcacaaaactatatatgtttccctctancttcatcctcatactgttctgcttcgatactcactcacacgctcgccgtgtctactatcagagcctatatctatccatctcctttctctctcttatgttgatactacatcactgcacacctctctacgtcagctgtgtgctgtctctaagaccatacacctctctcacccggcttacatcacttacatcatcttactgttatcctactggtctgtcgtgtcgatactatatatatgttatgactattgtttatctggtgctctgaacacaatcctcgcacgcctccacccgactcatacaccagataatgatataagtatgtacatgcattctctattagtgncttatggcggtcgtggtgtgtgttagcatcatatgacctctncnctctctcgatgctccgctgaccgtactccacactttctcgagacat

SEQ ID NO: 15531 - DNA, 478 bp, Glycine max
  misc_feature (76)..(76): n is a, c, g, or t
  misc_feature (167)..(167): n is a, c, g, or t
  misc_feature (349)..(349): n is a, c, g, or t
  misc_feature (374)..(374): n is a, c, g, or t
  misc_feature (428)..(428): n is a, c, g, or t
  Coding DNA Sequence Number=SeqID_5752
taacgtgtagtatccccgtgatagaccccactatacgccagagggaggtgttgaggggtgagtgggagggatgttngtatattaatagagagtttctccacattccgagaaacatgagagcctctttgtttatataaaagagagagagcgtattctcgctgtcgtcntataattgagggttgagaattccccgcccttccttctcctctttctatatttcctatcgctgttatagaagagaacaacaacgcgcaacacatattttccgggtatgttgtcgtttcttgccgaaagtttaaggggaatgtgttttcctttacgggttagtaatgggttgcctcgccgttcnccggacatttcgcgcgtcggccagnctcccgcgcggcggggtatccctcacctttatgtttccctaagatattccgtgntccctttctctaaccacgaccgggatgggaaagcttaacccaagcctatt

SEQ ID NO: 15532 - DNA, 344 bp, Glycine max
  misc_feature (296)..(296): n is a, c, g, or t
  Coding DNA Sequence Number=SeqID_5753
gccctctcctgatcagacgacaggagatccgccgtgtccgcgacggagcaggtcgccctcccgcgagccccaccacctacgccggtcgattccagccgaatctggcggcgcccagcaccctcccgtgaacgcctccctccgctccgtcctcctctccgacccaggcggactccagcagccacccaccaacagccctccccgtggcgtgcctagggtttcggcctgcgtgtcgccggcgactcttcttggccgtgatccgccacaaccgcggcgacctcgacggatctgcggcgcancagcgagggtcacttcctccgacctgcagcgaccatagtgacacggat

SEQ ID NO: 15533 - DNA, 500 bp, Glycine max
  Coding DNA Sequence Number=SeqID_5754
gggtgcaaggtgtaccgggacagcggagagggggagacccacccccccaccactcagcctctgatcatgggtatcgcaccatccaagggacggggtggtggagggccgccggagcgcagaacggcgggggcaagtgcggcgccgactgcacctgcgacccccgcacctgcaagtgagactatcacggtggcggcgatgacacggcgggggctgcaggccctcatggggtcagaaggaatctttatctttctagctaattaataagttctagctagtatacaatattctagtagtgtggtttgctttgcattgtccgagtcagttagacagtcagccgcgtgccatgggccatggcatagcatgcctcgctctatctgctccatcgccttgctctagtggtggtagtgatgggggaacgagtaagtgcagcgagatgttgggcccgtgtcgtgtcctgctgtgttgtgtcatctccttcctgtagctcatctagcagtcag

SEQ ID NO: 15534 - DNA, 486 bp, Glycine max
  misc_feature (75)..(75): n is a, c, g, or t
  misc_feature (90)..(90): n is a, c, g, or t
  misc_feature (92)..(92): n is a, c, g, or t
  misc_feature (284)..(285): n is a, c, g, or t
  misc_feature (321)..(321): n is a, c, g, or t
  misc_feature (323)..(323): n is a, c, g, or t
  misc_feature (359)..(359): n is a, c, g, or t
  misc_feature (387)..(388): n is a, c, g, or t
  misc_feature (401)..(401): n is a, c, g, or t
  misc_feature (418)..(418): n is a, c, g, or t
  misc_feature (427)..(427): n is a, c, g, or t
  misc_feature (436)..(436): n is a, c, g, or t
  misc_feature (456)..(456): n is a, c, g, or t
  Coding DNA Sequence Number=SeqID_5755
tcccagtgtggtgcatatccaccagcgagttagagctcccgccgcacgttgccatgccgtgtttatgttctactntcgctctctctcacntnctctcgttgtcctatgcgctgtctggtataattgcagggagggtggcgtgcgtcgcagtggtgcgtccccctgcctctccctctcgccctgctcaaaacagacgtctgtccgctctggcgcgggtggcgcgcgtctgagtgagcggtgcgctgagtccctcggttgtcgtgtgggcggcgcgggctgcccgnnccgccgtgctcgtgctcgcatatataactgcctcgngnactttgctccctaggtgtgtaggggcgtctgttgtnccgaaaagaaacatgcatcgtgcgttgnnccgtctggccgcncccccctagtgacccgnggagggggnccggccctnccgtgtggcggtcggtttgnagtgtgaatgtaacctctcgtccgcgttct

SEQ ID NO: 15535 - DNA, 201 bp, Glycine max
  Coding DNA Sequence Number=SeqID_5756
tattcaggaagcgaaggagacttgcgctgacgatcctgtgagcggagagtgtgttgcggcgtgggacgaggtggaggagctgagcgccgcggcgagtcacgctagggacaagaagaaagctggtggatccgatcctttggaagaatactgcagtgataatcctgagactgatgagtgtcgtacttatgacaactgaaaatg

SEQ ID NO: 15536 - DNA, 535 bp, Glycine max
  misc_feature (106)..(106): n is a, c, g, or t
  misc_feature (442)..(442): n is a, c, g, or t
  Coding DNA Sequence Number=SeqID_5757
gaccacgctcttactgattccgattcgcgcactccgtacagtacttgacgcaagatatacagtcacgcagcacgagtctatatagtatattaagatatatataganataccacacattacatcacctatcatccatagcgcgccatcgtgccattgattactagatgcgaatggaacgcacccagtacttacctataatacttgtcattgattagatgcgagagggtatggcgtatggcatgcccgcgtcgcagccgcactccagcttcagatagtgtatatctagggtacgctgatcttttatatacacaatgttgtgaatcaagatctacatgagccattgtatatcacagctctgccgcacaagatatatctactctctgtatatcatagttatcattagcgttgttgtggttattatgattctatatactactggctnactgtccttgtgtgtggtatacggcatatctggtaacacgccgccgctcctagcgtcattcatgtggtggtattattcgtagtggtgtcaggc

SEQ ID NO: 15537 - DNA, 518 bp, Glycine max
  Coding DNA Sequence Number=SeqID_5758
ataggatgaaacctcacatctccggtgaaagctctctgggcaatgaattgaggagatctgtcagcgagaagcttcatcacgttgatgatgctaacgctgccaagcaaggtagggttctaaagtatatacaaactgagaagcgacggaggaggagccaccgtgcagaagaccccataagaaccttgatgttcttaggctctatgaatcacacatgacatgaatcatgattgatgaggtatttggacctagctagccttggtgttgaaatttaactccctttgagtttggggtgaaaaatcaaaaccaaaattcattccaattgtcacatatataaataaatatgttagtacagcagtgatgtaaatatgtcatggagcttcatatatatatatatatatatatagagagagagagagagagagagaactacatactaaaaaataccagtctacttatgtatatgtgtatattatctaatattataatatctatatagtttaaagtttctgattccatta

SEQ ID NO: 15538 - DNA, 586 bp, Glycine max
  misc_feature (197)..(197): n is a, c, g, or t
  Coding DNA Sequence Number=SeqID_5759
tgacgtgcacgtcgacgatcgaaatgatataacaacagactgcgtacacactgactcttgctcaccgccaattatactattatcacctatattatcgtactcctatgcgactactgtgaccaccgccagcttactcaagtaaatgagcgatgagccgactctgcgttctacaacattatacccacggcttaatcagntttcgagcgcaccactgtctcttctcaacaaatgcagaacacccttcacgatcctcctacgtggctctctacccccatcttctctctgctcgatagatgatcgtcgagcggaccgaagcgttgcacaaagcaatggagtcgcgcgggaagatcgctcactccatcgcagacgacttcactaaaactctatcgttctttgcagattgcatactaagatgtatatagacactaacgaataatatgagtatatcatattaattagacagagtcgccgacctgacgtacccctcatatgcgtatatatcctctgtgatgtcacgacctcgtactatccatcataactcttctgttcgcaatatacgcgatttgtgacagtctctctatgccga

SEQ ID NO: 15539 - DNA, 425 bp, Glycine max
  misc_feature (98)..(98): n is a, c, g, or t
  misc_feature (163)..(163): n is a, c, g, or t
  misc_feature (181)..(181): n is a, c, g, or t
  misc_feature (219)..(219): n is a, c, g, or t
  misc_feature (253)..(253): n is a, c, g, or t
  misc_feature (309)..(309): n is a, c, g, or t
  misc_feature (311)..(311): n is a, c, g, or t
  misc_feature (383)..(383): n is a, c, g, or t
  Coding DNA Sequence Number=SeqID_5760
atatttcgtctgcactggcgccgtaggctgcggtacgtaacaattcgctttcgtagcagtgacggtcgacgaggcgagcagtatattagatatacatnctatcacaaacacacacaggcactagaagcaagagatcaccaggagctgtgtgtcgcatatgcancgaggaggacgtcgacgnacaatatatagtaagacagtagtcacagtaagacacantccgagcagtgccgcagcagcgacacgacgcagngaggtaggatggtgtcgagtgacgagacagtaggacgggcgaggagtgtcgcgtgntntcactactctcagcttataacattattctccttcgccccctctcactccaccggttgggtcacacattatanctctactactcattctaatataattagcgaccgcgcgtacct

SEQ ID NO: 15540 - DNA, 539 bp, Glycine max
  misc_feature (78)..(78): n is a, c, g, or t
  misc_feature (200)..(200): n is a, c, g, or t
  misc_feature (310)..(310): n is a, c, g, or t
  misc_feature (435)..(435): n is a, c, g, or t
  misc_feature (514)..(514): n is a, c, g, or t
  Coding DNA Sequence Number=SeqID_5761
tccccactcacttaactgatcggtatcaaagcgagaaggctcttacctagtctattgcgtgatataacttatattacngtaacgaggaggagcagcccagcgcacacgcgccctcttcatagtacagctatctaacatctatctcacagatgaggtgataagctatcacagagcaccctgctctgctcattatcatctancacggtccagtcgtgcgtgttgtcgtcactgtcgtagctctcgttcccacaccacgcttatcacacctgcgctacgcggtgctctatcacgacctccctggctacccacntcaactcatcccctacactacaaccctcacctgcgacgtccgaacaaccgagcgaggtggctctcctcgcgaagactcacctctgccgataacacacatatgttcaataatagaatataataaanaagcaccaaatcacgtgactctgatgtcgtcatctcggtgtgttgtatgctctgcctaggacgaccgttacatattggntatgaaccactacgatcgcgatcgt

SEQ ID NO: 15541 - DNA, 580 bp, Glycine max
  misc_feature (113)..(113): n is a, c, g, or t
  misc_feature (119)..(119): n is a, c, g, or t
  misc_feature (375)..(375): n is a, c, g, or t
  misc_feature (534)..(534): n is a, c, g, or t
  misc_feature (539)..(539): n is a, c, g, or t
  Coding DNA Sequence Number=SeqID_5762
atttattaacctgagcatgctagcgagtaccatgcctgggcgattctcttattctactagagaaacatacaggagtgggggtgagagatgaggtgcagcggagagaagacggntgtganaggaggcatacagaataaagagggatgagtaagacctcatgtctgcgacatatataagacgtgtacctgaatcagcgatcaatcatacacgagaatattgaatttcattcaccaatagagtcatacacgacaattgagcatcgtgcatcgggtggctcgtacagtgtgttcctcgctatttaaaagtcatgttacgtaatgtgtcgcgcatgttctttgatgacttcgcggcgggcggtgtaactcgtcattaaanctgtactcatgcctactattagaagacagtaataagtagatacagtaccggactaatggtaaaaccaacgccagagacggatggttgtatgaaaggtctttatttttttatatcttactctctgttctctcccatcggcgtatgtagtgttagtcttgnttccntttggttgttggagcaagtgtcgtcctcatttatgtgtctt

SEQ ID NO: 15542 - DNA, 421 bp, Glycine max
  misc_feature (55)..(55): n is a, c, g, or t
  misc_feature (66)..(66): n is a, c, g, or t
  misc_feature (133)..(133): n is a, c, g, or t
  misc_feature (150)..(150): n is a, c, g, or t
  misc_feature (164)..(164): n is a, c, g, or t
  misc_feature (193)..(193): n is a, c, g, or t
  misc_feature (209)..(209): n is a, c, g, or t
  misc_feature (220)..(220): n is a, c, g, or t
  misc_feature (268)..(268): n is a, c, g, or t
  misc_feature (277)..(277): n is a, c, g, or t
  misc_feature (298)..(298): n is a, c, g, or t
  misc_feature (327)..(327): n is a, c, g, or t
  misc_feature (329)..(330): n is a, c, g, or t
  misc_feature (362)..(362): n is a, c, g, or t
  misc_feature (364)..(368): n is a, c, g, or t
  misc_feature (372)..(372): n is a, c, g, or t
  Coding DNA Sequence Number=SeqID_5763
ctcctagcttcgtgatggcatcaatgcatgatctgtcgactgctgcgtgcgacgnacgctccgccnatatacatgcatagtagtacgtaacagtggaggctacgcgtgcgtctatgacagaattcgcgatcgntgtatgtagtgtcttcnctctcatatagacnaacatgtgaaatcagacgtatattgtacnctagaagcgatacatncatatgcctcnagagcatacaagatgacgcacatcacacgatggacgtcgtactcacgnaattggcanaccatatatgactggcataanccgcagcatcgatatcacagagacgactntnntctcactatcgtgttatcatctactcgtttcngnnnnngcantgctgcttgagtgatgcgcgtcatgtagatgagatacacagtgactcgt

SEQ ID NO: 15543 - DNA, 301 bp, Glycine max
  misc_feature (64)..(64): n is a, c, g, or t
  misc_feature (259)..(259): n is a, c, g, or t
  Coding DNA Sequence Number=SeqID_5764
gttcccaaatctctcgacctcggagcagccatgactcatatccttcaccgcgaataaaatcgcnttctctgttcatctaattttcgttgattcttgtcaagaattggccggattattactttatatctgttaccgtgtgcgagtgtgttgtgttttggttggatctgtccgtgttgttccttgaccttgctggcggctgcacgcggcgaccagagggagcgggaccggcagcgggcgcaggcgcggaagccggggaccnagggccgcgacgacgggctcacgccggagcagcgacgagaga

SEQ ID NO: 15544 - DNA, 543 bp, Glycine max
  misc_feature (57)..(57): n is a, c, g, or t
  misc_feature (109)..(110): n is a, c, g, or t
  misc_feature (114)..(114): n is a, c, g, or t
  misc_feature (120)..(120): n is a, c, g, or t
  misc_feature (152)..(152): n is a, c, g, or t
  misc_feature (161)..(161): n is a, c, g, or t
  misc_feature (219)..(219): n is a, c, g, or t
  misc_feature (301)..(301): n is a, c, g, or t
  misc_feature (304)..(304): n is a, c, g, or t
  misc_feature (354)..(354): n is a, c, g, or t
  misc_feature (357)..(357): n is a, c, g, or t
  misc_feature (397)..(397): n is a, c, g, or t
  misc_feature (425)..(425): n is a, c, g, or t
  misc_feature (432)..(432): n is a, c, g, or t
  misc_feature (434)..(434): n is a, c, g, or t
  misc_feature (479)..(479): n is a, c, g, or t
  misc_feature (517)..(518): n is a, c, g, or t
  Coding DNA Sequence Number=SeqID_5765
gtcagcttatctgagatcgcactcacatatgactctagcatatataacacacgcagncactcgctcccaccgcacggtcggcgtcgcactacacgccaccctaccgatnncggncgccgncgaccgctgttgatatatatatcactggtctnaatatgcanacgacgaggtgtcgggagcaagtagagatgaagaatagagctatatattatcggcatncactttatgtataacacagtaacaatggcggcacgtgcgcgcaccacgcagacatccgatccatgcagagaacacgtacacncanccatcatcgaagcacagataacgcactataacaaactagaacacatacanaangtatgagagagacagatcaagatatgggtgtaggctgcgngcttaggtgtcgtagtagggtgtgtagntttgatnantgttttctcctgtgtgcctgcgtcgtcgcgcttcgagcgggtggnaatgtgcggcacgttggctggttgactggacgcgacgnngcgttgctatgtgagctgtcataat

SEQ ID NO: 15545 - DNA, 441 bp, Glycine max
  Coding DNA Sequence Number=SeqID_5766
cagctaccgttctggacttgggaaagcagcttctggttggaatcatttaggaaagtcttactgatggagactctgcaccatcccttggtaaaaatggaagaggactatgccttgaactccgactgtgaaccgaattcttcttacatggcccgcacctgggattggaaaagtcatgatgagagctactcacttagccagactccatcaccacagagtttgtctccttcagcctcttatgagtctccttattcctccagcccacacactggacaaggtttggaggagatgccattcagctacagcttgttacagtatcctacactttgccatggagacaatagagaccttaccaagaaggatcatgggcataaaactttaatgacaactcaacgtaggagaaaagccagtgagagggaaaaagttccccttgagtcaatcgct

SEQ ID NO: 15546 - DNA, 148 bp, Glycine max
  Coding DNA Sequence Number=SeqID_5767
ggatgaccagcaagcatcaatccccgctaatgcgcctactgcacctattgcatacaccgccggcgcatctaaagagacaacagatggagtaacacctgctaagagcattgaattcaaggacaaattcaagaatatacgtgccagtctt

SEQ ID NO: 15547 - DNA, 187 bp, Glycine max
  Coding DNA Sequence Number=SeqID_5768
caccctcaatcttgaatcccttaatcccaaaatggcgtcagagaagaagctctcgaaccctatgagggacatcaaggtccagaagctcgttctcaacatctctgttggtgagagtggtgatcgtctcactcgtgcctccaaggtgttggaacagctcagtggtcaaacacctgtcttctccaaggcg

SEQ ID NO: 15548 - DNA, 498 bp, Glycine max
  misc_feature (433)..(433): n is a, c, g, or t
  Coding DNA Sequence Number=SeqID_5769
agcagtgacagacatcgtacagcgaggcagtgacaagtccggtcggcgtaatagatgtcagcgcgcatatacacgtagtacctactatattataagctgcggagctgtgctagatacatatcgacatacaacgcatacgcgtgctgcgtggtcggatctggtgtcggcgtgtgcgaattataataacagcaagtgtaagtgctgtcgtaagtattctagtgactctcagtctatacacatcacatatcgtcaactcggtacccgagtcacgaggatcgcggcacagtgcatacatcctacagccacctgcatatctctgacacaggcgccgctaaaaagtcgggattgactagggtgctactaaggtatgagggtctattcagagagtagtacactatataagaaactagaaaattcattgtagtgtgcatanaccttctcaccgagataccaagctacattcattgtcatcgcgaccgcccataatcatgctaagtt

SEQ ID NO: 15549 - DNA, 335 bp, Glycine max
  misc_feature (121)..(121): n is a, c, g, or t
  misc_feature (210)..(210): n is a, c, g, or t
  misc_feature (256)..(256): n is a, c, g, or t
  Coding DNA Sequence Number=SeqID_5770
taatcgaaaactctctctcactctttctccgagaacaaaaaaaaaaaaaaaaatccgcgattcgctcttctcttggaaaagtgaaaaccagaagtacgaacgaaagagaagagcgatttanaagtgagagaagatgggggttgtcgttcacgaagctgttcagcaggttgtttgcgaagaaagaaatgaggattctgatggtaagtctcnatgctgctggtaagacaaccatcttgtaccagctcaagcttggganaaatcgtcaccactatccccaccatcgggattttatggttgagaactgggggagtacaagaaacatcagccttcccttg

SEQ ID NO: 15550 - DNA, 199 bp, Glycine max
  Coding DNA Sequence Number=SeqID_5771
cccgcgtgtcagagcgtggcgctctcgagtttgtggcggttccccatagcacgagtctcgtgctctagagcactttgtaccccatgaaaagtgaggttttcttctctctgtgtggccctgtgagagatgatgtcgaggtggtgagcgtgtgtaacccatgatgatatatagggtgtgagtattctctatcagagtttta

SEQ ID NO: 15551 - DNA, 558 bp, Glycine max
  Coding DNA Sequence Number=SeqID_5772
aaagaaggtcgcatgtgtgccctcccctctaagacgtaccactccgaaggcgggttgtgagcttgcgcggagtgtccgtctcaataatatgacatattttgtgccaagcggggacaggggggtgaattaaaccattcggtttagaatccgcctcgccacgcgaggtgatttttttttaaaaacctttttttttttcggggaaggggccagagcatttcggcaacgtggcctggcaacagggcccttttaaaagaaaccggggggtttggcgcgacactccaacaattggtccgggcttcaacttggcattacccgtaacgggggccttgagccttgcccagcggggggcaaaaacaaaaaagaaaaaaaaaaagggttacgggggatcccctgggaactcgagaaccgaaattccgtgctaattcataggagcgaggagaggagagaatggttgaacgccaggagacgggccactaacaagcattgggtccggagtgttgaaggagcgaaattggaagatcactagaaaccttgaaggagcacaacattcgttcgaac

SEQ ID NO: 15552 - DNA, 441 bp, Glycine max
  Coding DNA Sequence Number=SeqID_5773
cagaatttatgcaaactgatacaaatagagtaaatcagattactaattcagtaaatgaattaaaaacattatctaaaacattagctgacttagggagtaatgaattacagaagaaattttttacaaatcaaagcagaaagtataatgtgggagagttaacaaagacacatgctcctgtatcattagtaacacagaagaactcagtatctgtgagttctaaatcatcaacttcagatcctccattaaatcatcttgatatattctctaaaatatatccaagaattacagaacaaaatttcaaaactataatggtcaatttagcaaacagagtttttccaaatgactctatgaatttacattcaacaataaattacgctaatgtacagaagataaaagttttagtggaaacacataaatctaaagagcaacctagaagatcat

SEQ ID NO: 15553 - DNA, 528 bp, Glycine max
  misc_feature (148)..(148): n is a, c, g, or t
  misc_feature (300)..(300): n is a, c, g, or t
  misc_feature (304)..(304): n is a, c, g, or t
  Coding DNA Sequence Number=SeqID_5774
atcggtcgtcgttgaggctaggttagttggaagtgagtgataagggaagggtatgccagagcggctggaatcgcgtggctcgtcgtagatatttcacgtgacagccgcctggcgttcctcggcgagacggagatagatgccctcctanagcctcatcatcgtagtccatccgtacagataatgagaggagttccgatgtgagatcgcgttggtgtgtatcgcttaagagaaatgaatattacggttggtcatcacagcgcatagcatgcgtacgtacagaccacgcgtcgacgagcaganaaanaacgcatctgctgggttaatagcgagcaacactgccctcacaacactcgcactaacacagccagtgcagcgacatcacgatagagaaggtacatacatgacaccactatcataacatatataaatgattaattacttcgactatgactctaatgagacattccatatttccatggtggggtgagaggtgttctagtagtagtactctcagttggtgtgtgcgcg

SEQ ID NO: 15554 - DNA, 430 bp, Glycine max
  misc_feature (49)..(49): n is a, c, g, or t
  misc_feature (61)..(61): n is a, c, g, or t
  misc_feature (89)..(89): n is a, c, g, or t
  misc_feature (188)..(188): n is a, c, g, or t
  misc_feature (345)..(345): n is a, c, g, or t
  misc_feature (348)..(348): n is a, c, g, or t
  misc_feature (353)..(353): n is a, c, g, or t
  misc_feature (369)..(369): n is a, c, g, or t
  misc_feature (373)..(373): n is a, c, g, or t
  misc_feature (402)..(403): n is a, c, g, or t
  Coding DNA Sequence Number=SeqID_5775
atatcatcacatcatacgcatagagatagaccgtagagtaagaagaganaaacgtattcanagatacatagtagagagagatacataantcaaacatcaagagcataagtatagtgttagtatagtgagtatacgcgcacgatatcagtacgattatgcactatacgctaacgactacactatcagancgtacacacagcatgacgaagcagaatattaactcgctcatcagagcagatcacatacacacgtgacgatcgcacgtgtacagcatagatctaaatcatacatcacatactcgacacacaatacagcatcatcctccaccataccactcagatggtntgngcttnacgcgttggggcgtgnggcngggggcggaggatgttgggtggtttgctnnccagagtcgaagcgctctttgtccggc

SEQ ID NO: 15555 - DNA, 511 bp, Glycine max
  misc_feature (256)..(256): n is a, c, g, or t
  misc_feature (277)..(277): n is a, c, g, or t
  misc_feature (282)..(282): n is a, c, g, or t
  misc_feature (367)..(367): n is a, c, g, or t
  misc_feature (405)..(406): n is a, c, g, or t
  misc_feature (409)..(414): n is a, c, g, or t
  Coding DNA Sequence Number=SeqID_5776
tttcctctaacctttttcatggaagacagattacaagagttacgtgagcttaattgaacatggatagaatttaagtctctgtttggtttgaaaaaatgttctttgttttcttttcttattttcactaagaattacaatagttactttgttttcacttggtcaactgttttcaaagatatatacaaaaatcggtgaatacaaatctttgatcttcacctaacctttcatcatttcctatagtaaatttttgcaaacngggggatatataaaaaccacntagcntttttcatagtactagtgaaaacaaaaaaatgagaacaaaaattttttcttggataaaaaaatcccttaaatttctttttcccanttgcccattaaaaaaaagctttggtttccctagaaaannttnnnnnnaaaaaaaaaacctccccaaaaggcaaatctttttttgaaaaaaaactaaattttccctttaacaattgtttttccccaccccataattttgggtgca

SEQ ID NO: 15556 - DNA, 277 bp, Glycine max
  misc_feature (148)..(148): n is a, c, g, or t
  misc_feature (211)..(211): n is a, c, g, or t
  Coding DNA Sequence Number=SeqID_5777
ctgcatatatcaaagaccgctctgttaagttgctcattctttctgctaacactatgctcatgatctgatatcatcgccccaagatcttctctattctttcctactgatccttccaatactgcaaacttcttatacaagatcttattgncattattaatagaactaatcgccttttcaaagtccacaataatctgagtcgaactttccttgngaatctttgccaactcttgaacattatcctggaactcatgttgaacttgattgaccaagtcctcaa

SEQ ID NO: 15557 - DNA, 140 bp, Glycine max
  Coding DNA Sequence Number=SeqID_5778
ttccatttatccccccctttctcatccttctcccgccccccctccccacccttttccccctcctctccccgtttttccccctttgcccccgttggtccccgtccgccgccgaccctccattccgcccctttgtcccgctt

SEQ ID NO: 15558 - DNA, 574 bp, Glycine max
  misc_feature (546)..(546): n is a, c, g, or t
  Coding DNA Sequence Number=SeqID_5779
aatttgtctcagtgtattacagggctaatgtctgctgagtctacaactcatatcacgatcgcgcgtcgtagccgctgtctcactatctatattataggtgcagaagacgaggacgggtggactgctggccaccttatcatcacgcatgtatatgacgcacaccatataagtataatatatatatataatattattatctaattcaatctacccctacgcgctctcttctcactccaattacatcggcatatatagatgagcggacgagtggctgagtctggtcgcgcgcgggtcgatatggatacgacggcggatgatgagaattgcggagtgggacagcgatgcacagtctgagaagatgagtaatacccacaaatagtagcatataaatatggtgtgagtcggagcacacccactatattactcaattcctgtagccacgagtattcacaatgtgcgtgttatttattaacattcaagagactatatacataccagacgaagaaccagtacacatgtattattggtcatctgattggcgccgcngcgcgatgtcgcgatggtgtacggttat

SEQ ID NO: 15559 - DNA, 466 bp, Glycine max
  misc_feature (33)..(33): n is a, c, g, or t
  misc_feature (39)..(39): n is a, c, g, or t
  misc_feature (42)..(42): n is a, c, g, or t
  misc_feature (133)..(133): n is a, c, g, or t
  misc_feature (152)..(152): n is a, c, g, or t
  misc_feature (286)..(286): n is a, c, g, or t
  misc_feature (368)..(368): n is a, c, g, or t
  misc_feature (423)..(423): n is a, c, g, or t
  Coding DNA Sequence Number=SeqID_5780
gtggatgtatctagcaccacactcccaccaatntatctnctntctatcagaacagaatacacaccgcatagtactctcatcgagccagtctagacgcacatgtatcctgcgcgctaccactcctctactctancagcatccgtggcctcccngccgcagacgacctacacgagtatacgcacagcactcggtccatacagcgagcatgcggtgtcggcacaggccactagcacacgcgttgtgctcgcaagatcagcctaggcgagcgtacagtacgcgcgagtgngccgcaagacatagtagaaacactctctcgcgccgcactcattgactacgaccgctctacacaggtcactctcatctctgtnccgaaacgccgcctgagcgtcaggtgcgtcgcgcgtcagcggcgctaccgacgcngccggatgtgcgagttgcggctatcgacagtagtcacaccgca

SEQ ID NO: 15560 - DNA, 513 bp, Glycine max
  misc_feature (39)..(39): n is a, c, g, or t
  misc_feature (120)..(120): n is a, c, g, or t
  misc_feature (170)..(170): n is a, c, g, or t
  misc_feature (187)..(187): n is a, c, g, or t
  misc_feature (198)..(198): n is a, c, g, or t
  misc_feature (234)..(234): n is a, c, g, or t
  misc_feature (244)..(244): n is a, c, g, or t
  misc_feature (247)..(247): n is a, c, g, or t
  misc_feature (273)..(273): n is a, c, g, or t
  misc_feature (303)..(303): n is a, c, g, or t
  misc_feature (306)..(306): n is a, c, g, or t
  misc_feature (321)..(321): n is a, c, g, or t
  misc_feature (324)..(324): n is a, c, g, or t
  misc_feature (346)..(346): n is a, c, g, or t
  misc_feature (348)..(348): n is a, c, g, or t
  misc_feature (363)..(363): n is a, c, g, or t
  misc_feature (366)..(366): n is a, c, g, or t
  misc_feature (376)..(376): n is a, c, g, or t
  misc_feature (420)..(420): n is a, c, g, or t
  misc_feature (429)..(430): n is a, c, g, or t
  Coding DNA Sequence Number=SeqID_5781
atgataccatcctctcatctctctatctctactacaccncacacctctagagatgccacgtcagtaccacgagcactaccaactcacgacacactgacagctcggtatcacctacactanaccacataccatctgcagacgcctagcccaccgtatataactgactctcntgaagatacgcgtacgncgcacagctantccactcatgaaatgcatctactagagatccgtatnctgtctgagntgntgtcactcgcagcgagtagcgcgagnagaatcctgatgctcgcctgagataccatnagnaatatgttaaatcancantagtgcagatcaagattgcctncntatcatcaccacatnatnattctcacangacgtcataaaataatagtttcacacgtacttacaatactacanacatacatnntactagttaccgacatgaataggaaggcaagaagagacgatcgttgttagatgtatgatatgaatagacaaaggagcacgcaa

SEQ ID NO: 15561 - DNA, 510 bp, Glycine max
  misc_feature (145)..(145): n is a, c, g, or t
  misc_feature (267)..(267): n is a, c, g, or t
  misc_feature (388)..(388): n is a, c, g, or t
  Coding DNA Sequence Number=SeqID_5782
gtggtgtgagtgtacgacaatcccccccacccccggccgtgcttgttgtttttatatgattttaattttgctgataataaatgtgcccgcccgcgcccaccccccactagctggcgcgggggagagtgatgtgtgtcatatcggncttgggcattaacgagcctggtgaggtgatagtagtttccgaggcacttcacagcaggagcatgtgccttgctgtcctcggtacgtgcgagtgctggatacgagccacacacgatggtgggntcttgtctgacgcatgacgatgagactatgtcgggagagggatgaaggcccgaggccacgtctatttctggtcgctcgacattgtatgtttgtgacttgcttgttttgtggccgtagtagngtgtggggactgtgtacctacgtcgtcgcgtgggtgctgtcgtgtcttcgcaggcaccgcgagacgagatcgactcgctcggcagtcaggtgacagatggcggtatctatcacgacacgagt

SEQ ID NO: 15562 - DNA, 384 bp, Glycine max
  misc_feature (356)..(359): n is a, c, g, or t
  Coding DNA Sequence Number=SeqID_5783
ggatgtcactttacttgccagagagttggatgccatggaaaatgttttacccgcgaagtatgaagaagcaagggaggaagagaaagatgcaagaaaaggagggcaagtccaagaggaataaggagtttaagttctaaaggtggtttcgtgtctttttctttcgcagaaaaaatgggggacccggaagttatccattcatcagagagtcattttccacgtaaagaggattgatggttagctttgttgtatggcatttctttcacaagtagttgtccgcaagtagcttgaatatttttggataggaacatactactcgtaatttaaacacctcagacagcgctggttccaataagggnnnnaaagatggaaatttagaccagtgcc

SEQ ID NO: 15563 - DNA, 551 bp, Glycine max
  misc_feature (103)..(103): n is a, c, g, or t
  misc_feature (105)..(105): n is a, c, g, or t
  misc_feature (115)..(115): n is a, c, g, or t
  misc_feature (138)..(138): n is a, c, g, or t
  misc_feature (194)..(194): n is a, c, g, or t
  misc_feature (224)..(224): n is a, c, g, or t
  misc_feature (294)..(294): n is a, c, g, or t
  misc_feature (311)..(311): n is a, c, g, or t
  misc_feature (351)..(351): n is a, c, g, or t
  misc_feature (366)..(366): n is a, c, g, or t
  Coding DNA Sequence Number=SeqID_5784
acactgatgagcgtagcgtactgaacagatcatcttatgaactatcacaaccgcatctgctcatcacaatgcagctgcgatgtctcatggtgttgcatgtgangncgattgcgtncgagatgtatgcttgcgacgtcnatcacgcgtagctccgcgacgcagacgtagtgcaatgaggaagcatgaattgctcnatgattgctcctcattcatcacacaccacnttagaactgatataatactatactaccacggtcgtgactcgttcgcattgtagcttcggatctctgctgncgtgatcgtatgtgtangactatgctggtgcgtacggatgtgcgatgagcatcagangttgtagtctgtatncaacgctcgattcatgcgctcttctaatactaatatataatgagcttagtactgcacgcgactactatctgatctgtgactgctgagtacgtatggcaacagtatggctggcagaaaagtcgtaagtgccagacgtgtactatcagttcatacatgcgtctagcactgcgcacgtatcgctaaat

SEQ ID NO: 15564 - DNA, 490 bp, Glycine max
  Coding DNA Sequence Number=SeqID_5785
gctatttaacgctgcagaaaccatttctatgcaagctgattcaaatgaatggggattggaccaagatcatactataaactcgtacacaaaacaatgaagaggacttcttttacggggcgtacaacgaaatctcgagagatgggtagatgctgcctcatatgtccacactatattgttcataatgtgatgcgttccaggcgatctatgcgacgacaaaattgacttcaagatatcaggcattgtgggaattggccatccctaggtactttgagcaattgtcatctgtgatgaaagcttaccatctactatataagaaggatcggtacgaagaagatgctcctcacacagctacagagtccaatgagctcatactacctttgacaatgcgttatagacatcaacgaggtaaggaggactaacctatggataatactgaagccctattgcttccctatgacgatcatagactaggttactatgatgacgactc

SEQ ID NO: 15565 - DNA, 422 bp, Glycine max
  Coding DNA Sequence Number=SeqID_5786
aaacagaactcgcacggttctcgtctaatctctctctccctctctctctacaatggctcgatcttcgtctccgtctctttctctctctcgctgccgattcgccgcggtctccctcctcccttcatctcgatccatcttcttccgatctcaatcctcgaaccgccgctccaacctcggggagttgattgagatcgacgtcgccgcgtcgcagtcgcagtcgcaatcggatcctctttcgcagaagctggaggacgcggtgcaccggataatggtgcgccgagccgcgcctgattggctccctttccttcccggcgcttcgtattgggtcccgcctcgtaggtcccagtcccacgggatcgctaagctcgttgagaagctggcgaatccggtcggagatgaagagtcagtctctgtcgcgtcgg

SEQ ID NO: 15566 - DNA, 268 bp, Glycine max
  Coding DNA Sequence Number=SeqID_5787
actttttacatggacgtgctttaagtgtaatgactggttcaaggcatttgttggggtggccgagatttgtaatgatagagttagttgttgacgtcgagcattgcttacaggcattcatagtagtggccgatgatcctattgccattatcattatattcagtggaacaaatggacacagctaacagaattggattgaagttatatagtgtacccaaattgaactatacttcctacaattttagattctaatgatagaccagtggatttt

SEQ ID NO: 15567 - DNA, 458 bp, Glycine max
  Coding DNA Sequence Number=SeqID_5788
actgttgttggtgcttagctcagttggctgagtctaattataggcaggttaaacacattttaccccacttttcttataattatacttcatccaaaggcctaggaatatgatccaagaatgctccataagataaatgtagttgcataatattatatgacaagaaattaagttttctatgacaaccccccaaaaatattcttattgggaatcaaatctaccagttggttgctcagaaacatgggttttacctgacaagcaagtgtggcagctccaattccacaagtacttcacgtacaagtttgcagaaaggagacccctaaaagaaacaagtattcaaatttaaaattctgttccagcagataatggctacattatcatgcatgctgatctataatttggagataaaagtcctgaattcattaagcattagggtgtatggtttgtgtatattgtggacc

SEQ ID NO: 15568 - DNA, 553 bp, Glycine max
  misc_feature (26)..(26): n is a, c, g, or t
  misc_feature (45)..(46): n is a, c, g, or t
  misc_feature (101)..(101): n is a, c, g, or t
  misc_feature (185)..(185): n is a, c, g, or t
  misc_feature (258)..(258): n is a, c, g, or t
  misc_feature (329)..(331): n is a, c, g, or t
  misc_feature (390)..(390): n is a, c, g, or t
  misc_feature (394)..(394): n is a, c, g, or t
  misc_feature (425)..(425): n is a, c, g, or t
  misc_feature (488)..(488): n is a, c, g, or t
  misc_feature (490)..(490): n is a, c, g, or t
  misc_feature (492)..(492): n is a, c, g, or t
  misc_feature (516)..(516): n is a, c, g, or t
  Coding DNA Sequence Number=SeqID_5789
gtattctcgtattactcagcgttacntcgtgatatattatgaagnngacttgagtatatgcacgcgattattgtacactagcgatactgctcgctctttantacaaatatatcactatcagtcttatatcactctcccacgccgctgtatactgtgcggtgagcactggcattagtgtatgtgtngtgttacgctcccacacgcgcgctgacagcgcgagatcgcacgatggctaacgtatccgtgtactatatattnatatacacgcggcgcgacgtacgtgcggacgcctaggtacacggtctctgaccggtaacgcagttagtagnnngtcgcgatctacacatgaaggtacagacatatcgtatatattagtatcaccacacggcncgcnatcgtcagagtacaccatcaagcactcgcancctagttctgcgccgacactcaacctactctgcagcgcgatccagcacgacaataatgatcgntnanatacggctgactcgctggcagacngcagcatgagattagcgcgtacgcgagtatacataat

SEQ ID NO: 15569 - DNA, 549 bp, Glycine max
  misc_feature (67)..(67): n is a, c, g, or t
  misc_feature (95)..(95): n is a, c, g, or t
  misc_feature (97)..(97): n is a, c, g, or t
  misc_feature (101)..(101): n is a, c, g, or t
  misc_feature (110)..(110): n is a, c, g, or t
  misc_feature (180)..(180): n is a, c, g, or t
  misc_feature (208)..(208): n is a, c, g, or t
  misc_feature (223)..(223): n is a, c, g, or t
  misc_feature (248)..(248): n is a, c, g, or t
  misc_feature (350)..(350): n is a, c, g, or t
  misc_feature (358)..(358): n is a, c, g, or t
  misc_feature (460)..(460): n is a, c, g, or t
  misc_feature (516)..(516): n is a, c, g, or t
  Coding DNA Sequence Number=SeqID_5790
acttctctcctgtgctgtggcaataggacatcgtgcgcttccaagcactctattctatatacgtcgngaatgtgtattgtctcgtgtctcatttntnatantagtaatanatgatagagcacggagatcacgcacgacggaccggttgctagtgacgacaccatctaccacgcacttccnctatcagacgagagtgtgggacgcaccncccccacccctcacngcgctcgcagattagaacttaagcnagtacgacaccaacatacacgcatctgtaatgtctcacgcactcatgagtaatagtgtatcatagagttgacgcatagtcgagtacgccacagcgctagacnagatctcnatctaccagctcactcacaatcgtgacatacgcactgcagatgatacatggtgcagcgaaaccgtgagcttgtcgctatcacgatgtatacacacccgtttnattctcaccaacaccgctggctaccgacactacatacgtctactcgcgacgacgcnactgatctgaattaggcggtcaatcggtatagc

SEQ ID NO: 15570 - DNA, 450 bp, Glycine max
  Coding DNA Sequence Number=SeqID_5791
tctcgaaataatggcgtcgcgcttcttcgtgtatagggtagctcagtaccccgccatcccccaccaaatcctcggtgagcatgggtcgcgcattgagtcacccaaattttggacttttgttccttcgtcaaacatccttcgtctgtacctgagtcacgccacgcagcccctcaagacccgacaatccagctatgtcgcaaaaggggaagcagagcgccagctcggcgaagggaaagaagtcctccaagccgggcgctgagagcaagagcgaggatgtcttgcaggcagtggtacgcaggcattcgaagagctcttgtcacaagcaatgctaatcagggcgcaggttcttgccgactcattccaggaccggttcaagcctctgaccgtcgaaaagccaagagtaagcccccgcccggacggtgttagagcgatgtgctcacttggtataca

SEQ ID NO: 15571 - DNA, 410 bp, Glycine max
  misc_feature (274)..(274): n is a, c, g, or t
  Coding DNA Sequence Number=SeqID_5792
agcgcgcctgttggagatgctctaacagcgtggaaaaacgagcgggggtgtcgcttgcagcctctggtaaaactcgttcgcacaaaggagagaggccgaaaagaggagacgctgagagaggaacagatacatcctcgtcgcagcaagaccacacgacggctcaccctcgtcagcgacagctcccctctccctgtaatccttagccccttgccatctgggtgcgccgtccccttccaggcacagctgccggcgacctctccttcaccatcaccanctctccaccctgagctccgacctacccaccatgtcaagcaggtccagatccgccacggctcccgcagccacgcgccggcagaccaatcgggtgcgcaggtgcacgacgtgtggttatactcttccactctcgtggc

SEQ ID NO: 15572 - DNA, 578 bp, Glycine max
  misc_feature (43)..(43): n is a, c, g, or t
  misc_feature (57)..(57): n is a, c, g, or t
  misc_feature (95)..(95): n is a, c, g, or t
  misc_feature (318)..(318): n is a, c, g, or t
  misc_feature (351)..(351): n is a, c, g, or t
  misc_feature (384)..(384): n is a, c, g, or t
  misc_feature (458)..(458): n is a, c, g, or t
  misc_feature (479)..(479): n is a, c, g, or t
  misc_feature (512)..(512): n is a, c, g, or t
  Coding DNA Sequence Number=SeqID_5793
gtctcggcgtatatataactgtacacgcgacagcacgtagtgncggtctacgtcgantgtgatatagtataaatataataatatgatacgcgagncgcgccggcagattatatatgacgcggcggcggcgtgtgtgcgtagacagatggctgacgtatggcgatatatgcgtcgcgatatgtcggactcgcggtgcgcgcgtatatacttataaatatatataagtaatcgtctgtatagacaagcacgcatgcgctgcggcgcgcgcattccgttgtgcacgtgcgtgtataatatatatagcggacgactgatcgngcgcgtgcggatgatagtgagacatagagagtnactgagtcattcacatgcgcgtgcgtggggctngatcagacgcgacgtgagatatgtagactgagtcgttgagtgatccattagcgagtggcgacgcgcggcgcggngagcgactatatgtataggtnatatatgcgtcgagccatgagacggtggtcagngcgggcgtcgcgattagtacgatatgtgtatatactcgctgatcgcatctctcaggcgtgattata

SEQ ID NO: 15573 - DNA, 529 bp, Glycine max
  misc_feature (229)..(229): n is a, c, g, or t
  misc_feature (276)..(276): n is a, c, g, or t
  misc_feature (340)..(340): n is a, c, g, or t
  misc_feature (361)..(361): n is a, c, g, or t
  misc_feature (463)..(464): n is a, c, g, or t
  misc_feature (477)..(477): n is a, c, g, or t
  Coding DNA Sequence Number=SeqID_5794
ttggccatcatactcgctcacattgtcatgtttaactgcacacatgcccgtccagacctttacacgcgtcctctatacactacaaccaccgctcgctacctctttctctatttataaagttttattttatgtttattgtatttatttgttgctttcttattttctccttgcagtctccgtgttcacgtttcgcacttgttctggcggctcgcgtcgtgatcggcgtatncgttgcgtgtcttggtcggcatgtggagcagctacgtcctcgctgcntagcgtcgaccacccaaaaccgtatgctagagatgaataagggaatgtccacgtactggtgacnctgaatcattcggtcgtcctntgcggtgatggcctcttctagggcggtctcaggtggtggtgaggatcgcgtggtggtggtgatcttcacgtcaggaccgtgtaaaataagagacgacaaacnnaattaaatagaanaattacaggggagagaatggcgagttcgatatatatcacaggatgcggcggt

SEQ ID NO: 15574 - DNA, 437 bp, Glycine max
  Coding DNA Sequence Number=SeqID_5795
gctgaaattgttggcccttttggttttgtttaccccgttttttttgcccctgatgccaagaaaaacgctaaagactctcccgttcctattttggctccccttccccttggatttgctgtgtttttggtccacttgggtaccatttccctcccaggaactggcatttacccagctaggagttttggagctgccctcattttcaacaaaggccatgcatgggatggccaatggattttttgggttgggcctttcattggaactgcccctgctgctgtgtttccccaaaaagttatccgagcccttccttttaaaacaaagggttaggctcttgtttttgtatgggcctgcctgtattagttgttatttatgggtctggggtttttttccttttgaaaaatcaagtcaatctttttgcctttgtgttaatcccttgtatg

SEQ ID NO: 15575 - DNA, 403 bp, Glycine max
  Coding DNA Sequence Number=SeqID_5796
attgataaagctaatgtttcataacaaacaaatataaaaagagctaatgaaaatataaaacaaaattaattgataggttatgatgagctcaacgatccaacactatcacttgaagaaagcatgatagatacttacagagttgattacttttatcgttatctttattatcttcaaatggcaatcaggtaagtaatgcttttatcagaggagcctctgaagctctctctattaattgatttgtttgttttatgcattttaattcagagtaatattaatcctattttgtttcatagttcttttttacatttacagaaaaaggaaagtgtagaaaaccagtataggagtgtgacttttttggttaattcttttgtttttgttgacttttatgcacacaagggatggt

SEQ ID NO: 15576 - DNA, 365 bp, Glycine max
  misc_feature (28)..(28): n is a, c, g, or t
  misc_feature (50)..(50): n is a, c, g, or t
  misc_feature (52)..(52): n is a, c, g, or t
  misc_feature (54)..(54): n is a, c, g, or t
  misc_feature (60)..(60): n is a, c, g, or t
  misc_feature (227)..(227): n is a, c, g, or t
  misc_feature (229)..(229): n is a, c, g, or t
  misc_feature (316)..(316): n is a, c, g, or t
  misc_feature (337)..(337): n is a, c, g, or t
  Coding DNA Sequence Number=SeqID_5797
tatcgacacgcaaacccacatcttactncacaatatcagtacgagaggcngngngtgtcnccgctgtctcatcgctatgttgtgttgtcgcagtctgccgtgttgtagactaaagtcagcacacattttagttatcttgtacagctatgcaagatatacactcgatgaaaatgagatgcaccacgcatagcagtgatatattcagcgtcgcagtgagatgtgctgcntnagtcagcatttgtcaccccatgagtatgtcactagactatacttcatatggatttgctatgacgatatttaatatgctgtttgattntgattattattttgatacttnagagagttggcatgagcagcgacactac

SEQ ID NO: 15577 - DNA, 368 bp, Glycine max
  Coding DNA Sequence Number=SeqID_5798
ttgcctttgtggtgaactcaccatgattttctatcaccaaaccaaacactataaattctgttttccctattacctgttatgccatgccttattgatactcttctaaatttaacatcaaataagaaatataaaaggaaatagtcaacattgtgggagttttttgtaacttaatgtaattagcgtgatccgaacaggataaccttgtatgagtatatcttcttctttttttaaaaaaaactttttaccagaagtattataacctattaaccagttcattttgtttttaaaatctcctatcttgtttatgccatcttaatgaggtctctctattcatgcatgaaatgacattttactgatgcaggtagcac

SEQ ID NO: 15578 - DNA, 264 bp, Glycine max
  misc_feature (99)..(99): n is a, c, g, or t
  Coding DNA Sequence Number=SeqID_5799
ccgcagaaggtctcgagggtctgaagaggaagcgatgcgctcgtcagaagctgcgcagggcgaaagcgagcccctgctggtgagaagctgagcagtgangacccacctcgcaacatgatatcatgcctgaaatgatcggagccgcctgggcatctaccagggaagggctttcaccaggggaaatcaagccgaaaatgttgggcactaactgggaaaagttccccttgtcaaaaacccgggaaaaaacggagggcctggatatcg

SEQ ID NO: 15579 - DNA, 528 bp, Glycine max
  misc_feature (278)..(278): n is a, c, g, or t
  Coding DNA Sequence Number=SeqID_5800
acatgccaatgattccagaggttatattctctatgcaagcaactgcccgtgtcggagctatccactcagttgtttttggtgggtttggagcacctgaacttgcaggcagaattcaggatttaaagcccaaagttgtcctccttgccagttgtggtatcgaaccaaacaaagttgtcgattacaaaaaaatcttggatgaagctcttaagcttgcagctattcccaacataaaaaaaatccttgtgcaaagagaaatgtataaagtcccaatgatccanggagaagattttgattactatgaagaactcgctcaagccaagcctatggatccagttccagtcgatggctctgattatctttatattttatacacctcaggaactactggtcagcccaaaggtattgttagagaaaacggaggcaacgctgtggctctctgctacacaatgaaatatctttttggcattactgaaaatgatgtcttcttctgcgctgctgacgttggctgggttactggccattcttaca

SEQ ID NO: 15580 - DNA, 474 bp, Glycine max
  misc_feature (43)..(46): n is a, c, g, or t
  misc_feature (50)..(50): n is a, c, g, or t
  misc_feature (62)..(62): n is a, c, g, or t
  misc_feature (83)..(84): n is a, c, g, or t
  misc_feature (86)..(86): n is a, c, g, or t
  misc_feature (111)..(111): n is a, c, g, or t
  misc_feature (115)..(115): n is a, c, g, or t
  misc_feature (186)..(186): n is a, c, g, or t
  misc_feature (195)..(195): n is a, c, g, or t
  misc_feature (200)..(200): n is a, c, g, or t
  misc_feature (204)..(204): n is a, c, g, or t
  misc_feature (215)..(215): n is a, c, g, or t
  misc_feature (249)..(249): n is a, c, g, or t
  misc_feature (253)..(253): n is a, c, g, or t
  misc_feature (272)..(272): n is a, c, g, or t
  misc_feature (286)..(286): n is a, c, g, or t
  misc_feature (317)..(317): n is a, c, g, or t
  misc_feature (343)..(343): n is a, c, g, or t
  misc_feature (351)..(351): n is a, c, g, or t
  misc_feature (360)..(361): n is a, c, g, or t
  misc_feature (364)..(364): n is a, c, g, or t
  misc_feature (367)..(367): n is a, c, g, or t
  misc_feature (392)..(392): n is a, c, g, or t
  misc_feature (445)..(445): n is a, c, g, or t
  misc_feature (447)..(447): n is a, c, g, or t
  misc_feature (449)..(449): n is a, c, g, or t
  Coding DNA Sequence Number=SeqID_5801
cagacgatatagatgcgcgtagtatagtatatagagtgctccnnnncccnccgcaccgctcncacgatcgtccaagagatacnncnacctatgatacgggtgcgtattagntgtngtataatgcaacgcgccggcgacgttatcgatgacgcagcactactaatagtcgatatatcaagacgtaanatgataagntatantcgngctccgcgccnacgagatcgatgcctcgcgctgtcgaagcagcanatangatgattgtagacatgagngtgcgcgcgcgggncgcggctaacgtatctatataacagattcgncggatgaatttacctgagtactagangagctatnatcacgctnngcncgncatatagaactggatgatataaagnatcagtcactagtcacacatgaaagtgaatctccccgacgtatgtagtgtatncngngccactaaatctaaaacgcagtgat

SEQ ID NO: 15581 - DNA, 513 bp, Glycine max
  Coding DNA Sequence Number=SeqID_5802
attccttttggaggcagatctggttataaggctgagtacattgattggggtaagatgcctgttgagtttgaaaaggctcccaatagcaagactgttatcagcgaacttccatttgtaggtaaatcagcctaccaagagaactttgcatacaacccaagtgatcctgcccagaaacttaaaaagaccgacaccagatcccctctgtctcctggtatccccttcttgggcagaacaactcacaattctacttataaaccctacaaagttggtgacgctccaatgttctcacccaaagaagaatatgaacctactgaagcataccctaaccaattcaatactctttacagacaagattatgctaagccaaacaaatacaaatgtcctgctaagatctttatggagactcatactcatcctaaatacaagactttaaagcaataaactgatcaggctgtagaagattttgttaagaataatgaatgaatatatataggtgtttttctgccttggaaa

SEQ ID NO: 15582 - DNA, 456 bp, Glycine max
  Coding DNA Sequence Number=SeqID_5803
agaagttgaattatcccaccctcaacattcgtatacatttgtttacttttttttacaaacagtgaataaagaatgagcatatgatacaaatattaaatgaaacctttcaacaatttctccaacaatagctaattcctgtgtagtaaaaggtgccatcgataaagggcctggcgccgaaatcggcagcgggagagagcgcgaaaaccagggttccgggcccatttttaccaaagaaggctggtggaattaccccttttggtgggccccggatggctttttaaccttccgggggctctgggtttggaccaaaatttttggtttgggcaaggcccccaacccttgttgcctccccaggctggtttgggttcccaccaccaactaagtcccggaattgaaacttgtggttggtcccatcccaggttctttggttccattggttaaccaggcccaccaagg

SEQ ID NO: 15583 - DNA, 507 bp, Glycine max
  misc_feature (26)..(26): n is a, c, g, or t
  misc_feature (84)..(84): n is a, c, g, or t
  misc_feature (100)..(100): n is a, c, g, or t
  misc_feature (105)..(105): n is a, c, g, or t
  misc_feature (167)..(167): n is a, c, g, or t
  misc_feature (188)..(188): n is a, c, g, or t
  misc_feature (230)..(232): n is a, c, g, or t
  misc_feature (251)..(251): n is a, c, g, or t
  misc_feature (253)..(254): n is a, c, g, or t
  misc_feature (270)..(270): n is a, c, g, or t
  misc_feature (288)..(288): n is a, c, g, or t
  misc_feature (317)..(317): n is a, c, g, or t
  misc_feature (325)..(326): n is a, c, g, or t
  misc_feature (330)..(331): n is a, c, g, or t
  misc_feature (356)..(356): n is a, c, g, or t
  Coding DNA Sequence Number=SeqID_5804
actgggccactcagcaactccgagancgaacgacaaacacacagagtactgagatccacgtaggatacatatacactactgcgntgtcgcatccacatancagcnaccgtatacgtcacagactaatataattaataatacatgtgtacgtgtcacggtaaagtagntcatgtgtgctggtagttccnccgctcacgcgggcggccgccgcgcaccacagcccgcgcctnnnactctctctctcctgctcncnngcgccgacgacgccangcgacaatgagtagtggntaagtgatgattatatgtggagtgaggtnaaatatanntcannctcatatcgcctctattcgtacatnagatatttgagcggcttactcgtgcttgcacaattgatattcatacttactcgcagcacgctacacgtgtctcaccgatgcactatagactgctctatgataggatcatatagcagcgatgtgaagaaaaatgacgggatgtacacctgct

SEQ ID NO: 15584 - DNA, 539 bp, Glycine max
  Coding DNA Sequence Number=SeqID_5805
cgcacatttgggaacaagccttacagtgatgtgtccctctaaagacatttttaaggaagcaactaaacagatggactctgaggatggactaggagaggattggttatctgagtattcaggtgatgaggactatgaccctgaagaaaatgacttcacaagcagcagcctggatagtggtgaagaaagtatatctgatcagtccaattgttcaggaagtccgctttattctccaaacgatgatattccaggctttatatcagcagatttcactgatgcggaaggattctaccacaccaattcaaatttaggaattgattctgatgatgatgatgttgccgagatgcttacctaccaaaggccaaagagagaggaaatgtttggaaagctgactgagaatgaaaagcagagtgaagatgaagattggggtactaataataggagaaagaaaagaagagtggattcagctggtgttggagttaagtctgccgagggttccttagatgtaaaatcgaatgagaaagcccaaccgcagaggagaa

SEQ ID NO: 15585 - DNA, 415 bp, Glycine max
  Coding DNA Sequence Number=SeqID_5806
aaccactgataactggtgacccctgaagatcgctggagaagaatccttccgatggcatttgggttctcgattaccattgttctggggaatgtgagcctacgatactttccagtttatcttttatgcttctatacgtcattcccccctgaaccccaagtgtgttttgcatggctagtggggaagaagtattttgactggggattttgggctcccctaatccccattggggggggattccttctccatttggaaaaaagttttaattttaaaaggttgggatttcggggtgccctttttggggtggtgggctaactccaaaaaaactattttttggaaaatctcttttggtgggaaaaaattttgaacgcataaaccccggttttttaatgtggcccttttttgaaccatgattgtt

SEQ ID NO: 15586 - DNA, 449 bp, Glycine max
  misc_feature (36)..(36): n is a, c, g, or t
  misc_feature (170)..(170): n is a, c, g, or t
  misc_feature (203)..(203): n is a, c, g, or t
  misc_feature (217)..(218): n is a, c, g, or t
  misc_feature (265)..(265): n is a, c, g, or t
  misc_feature (269)..(269): n is a, c, g, or t
  misc_feature (420)..(420): n is a, c, g, or t
  misc_feature (424)..(424): n is a, c, g, or t
  Coding DNA Sequence Number=SeqID_5807
gtcatcatcataccacatacattagtagaagtagtngtagagtcgttctaacgagatatagcacatgacaaacgctctagccgccatagagactagagtgccaggatctcagcacatcgctagtcaacccacatcactgatataaactaaggcaatgtattaggagatgngagagatgggctgccagtgtattagcaggaatnagtgcgagcggtgnngggtgagacgcgtggaggttgacagagtcgtgacgcgtagccacggngcgngcgcatagatacagagcagcgcgctccgtggagccacagccatatgtgtctgtctcaactacaatagaatatatacagtgtgcgcgctggtgaataattgtgttataagtagagagagagagtggtgagcagcgcgcccacgctctcttangtcntcaatacttccccttcatggagtgg

SEQ ID NO: 15587 - DNA, 585 bp, Glycine max
  misc_feature (32)..(32): n is a, c, g, or t
  misc_feature (59)..(59): n is a, c, g, or t
  misc_feature (83)..(83): n is a, c, g, or t
  misc_feature (105)..(105): n is a, c, g, or t
  misc_feature (108)..(108): n is a, c, g, or t
  misc_feature (155)..(155): n is a, c, g, or t
  misc_feature (163)..(163): n is a, c, g, or t
  misc_feature (174)..(174): n is a, c, g, or t
  misc_feature (183)..(183): n is a, c, g, or t
  misc_feature (189)..(189): n is a, c, g, or t
  misc_feature (191)..(191): n is a, c, g, or t
  misc_feature (232)..(232): n is a, c, g, or t
  misc_feature (287)..(287): n is a, c, g, or t
  misc_feature (300)..(301): n is a, c, g, or t
  misc_feature (317)..(317): n is a, c, g, or t
  misc_feature (320)..(320): n is a, c, g, or t
  misc_feature (343)..(343): n is a, c, g, or t
  misc_feature (368)..(368): n is a, c, g, or t
  misc_feature (373)..(373): n is a, c, g, or t
  misc_feature (379)..(379): n is a, c, g, or t
  misc_feature (406)..(406): n is a, c, g, or t
  misc_feature (410)..(410): n is a, c, g, or t
  misc_feature (435)..(435): n is a, c, g, or t
  misc_feature (451)..(451): n is a, c, g, or t
  misc_feature (456)..(456): n is a, c, g, or t
  misc_feature (458)..(458): n is a, c, g, or t
  misc_feature (463)..(463): n is a, c, g, or t
  misc_feature (481)..(481): n is a, c, g, or t
  misc_feature (494)..(494): n is a, c, g, or t
  misc_feature (501)..(501): n is a, c, g, or t
  misc_feature (507)..(507): n is a, c, g, or t
  misc_feature (520)..(520): n is a, c, g, or t
  misc_feature (551)..(551): n is a, c, g, or t
  Coding DNA Sequence Number=SeqID_5808
atgtgcgtgtcgtgttgtgatgtacgccgtgngtcgtcacgccgcgtcggctatgatcntcacgatcgttgatgttttgatgnaatgatgatgcgatatacgacntcncgtatgacatactcgtgtacgaccgtgtcatcatctatgtgactatnttgcaggnagcgtgacgcncgtcgctgnacagcncngagctacgatcgtgtaagttcgcgtgaatgagtgcgtactnctgtatactatagacatgtcgaagactgcgctgtctcgagactgctgacgactanactctacatgatnnttctccgagcccgccnganctcgtcgtgctctatcatcggcnagcgcgctgtagtaggcgactgcgncatgncggagnatcatagtacttaaagggtccacgctnactncttggcatgcggcaacgagcagcgngttagcatgcgtcggngtcgntngtagntctcgatgatctactacnacagataaaccanaaggcantgatanacagtcctgtcangacactactgctgataacgcagcgcacactnatctgactcatcattatttcataccgttccccag

SEQ ID NO: 15588 - DNA, 590 bp, Glycine max
  Coding DNA Sequence Number=SeqID_5809
taccacgacggctttctttggaggaaatacggacaaaagcaaatcaaagaatcggaccaccaaaggagttactacaagtgtgcgtacacaaacgaccagaaatgcgaagcaaagaagcaggttcaaatgatccaaaacaaccctccattgtactcaaccacttacttcggccgccacacatgtcagcttcatcaagcctttgaaacttttcccattgacacctcagatccccaagattcacgcatgatccgatttgataacccagattcctctacccatcaacatcaaaatcagataattcatctcaaagctgaacaaatgatgccctctgagaaagcagaagagtggtcgtccccatctgagtatatgtcctccgaggttgcctacgctgtggaggctttcgggtttaaccctgctcgcacatcaagtgacttatcatgaccatatatgcccttcccgtcgctatcatcagacatctaaagcaactttagttatttgtttcctcataatatcctatagtatacctcctgttactttttttttgtgttttgcatctcatgtatttgcctacctctactttgaacttttgt

SEQ ID NO: 15589 - DNA, 529 bp, Glycine max
  misc_feature (61)..(61): n is a, c, g, or t
  misc_feature (65)..(65): n is a, c, g, or t
  misc_feature (80)..(80): n is a, c, g, or t
  misc_feature (95)..(95): n is a, c, g, or t
  misc_feature (122)..(122): n is a, c, g, or t
  misc_feature (131)..(131): n is a, c, g, or t
  misc_feature (189)..(189): n is a, c, g, or t
  misc_feature (217)..(217): n is a, c, g, or t
  misc_feature (366)..(366): n is a, c, g, or t
  misc_feature (467)..(467): n is a, c, g, or t
  Coding DNA Sequence Number=SeqID_5810
gtgttgcccgctcacttgatattagctctctcaccgcctcatcgcgcttgtgttatgtgtntggntggtgtgttgtgctngcagttgtgtcttgntgaggaatttgttctgtcggtcgcgancctgtgccntttgtgtatgttacccttggctagacggctccgcttctctgttgcgctctccatattntcgacatctattgttctctcttgtgcanctcacacagttgtgaagactcttgtcgccgccgtcggtctccacttctatttctgtagcgactgctacttggtttctcggcgcgtagcgctgtaggtgctcttatctgtacaggtgactcgcagcatactaatatacctactaccaacnttcatatcctccacaccacggatcgcgaggcgggcgacgccgaagtttggtaccactttatgttgtgtctatacatcgcatctatttatgtgcgaccggcnccctcatacttcactcacactaatatctatcatttactagtctatactacttcttctctatt

SEQ ID NO: 15590 - DNA, 378 bp, Glycine max
  Coding DNA Sequence Number=SeqID_5811
acaccacaccatcactatcacaaagccgcacaagcaagacaacatcctgataagtggtagcgcagcctcccagctagcactatggcaaagtgcctcgccgtcgccctcctgctggtgctggtgctcgcgtactgcggcgggaggcagcggaacgaggaggagcaggcacccgcagcggcacgcggtgccggggcggctggtggtggcgtcggcgaggagatgatgttggggttgcctgacctccggcctgtggccgccgttagcggtaccagccccactatcggcccgctcctggcgctccctgcccttcccgggatccctggttacccatgatcacctctagttcatgttctgtctttcaatatgaagctcacctcg

SEQ ID NO: 15591 - DNA, 537 bp, Glycine max
  misc_feature (102)..(102): n is a, c, g, or t
  misc_feature (319)..(319): n is a, c, g, or t
  misc_feature (334)..(334): n is a, c, g, or t
  misc_feature (371)..(371): n is a, c, g, or t
  Coding DNA Sequence Number=SeqID_5812
tggtgctagataatctcatccgcgccagacaccatatatagtaggactcgatctattgtgtggatgcgtgcgccctctctcgacacgatcttatcaaatcancctcgtcgccacagctagaggcacggccacgagaagtaattgtgtaatatatataaataaatagcgcgcgggcgcagagaatatagataagactagcgcgtgtgtcagcgcacacacatacgagatgaatatattattctcgtcgcaatacccgcccgacgctccgcactatatagcatagaacataactacaatgtgcgtgtgtacaacactcagnactaccgtcacgtcnctctagagacccgggggaaacgaatatacatcctctntgtggtatgtgcgagatgttgtgactaacacatactacaaatatttcctccgctaaatgaatatccgcgcgtatatgcgctatatacggtatactttagcgcggcggcgcgcgcagcacaaaggaaagcattgcgtatctcgttgccacgtccgatgagacatcta

SEQ ID NO: 15592 - DNA, 457 bp, Glycine max
  misc_feature (362)..(362): n is a, c, g, or t
  Coding DNA Sequence Number=SeqID_5813
agaaaccacttctctcattaaccctaattcacaccctttgcatctgcgaaactcgatctacagatctctccaagctcccaatctccagcagggagattcgaaagatggtgtccgacgctagcaagaagaaggctctccagaagaaagccgccgccgccgccaaaagaggcggtaaagccgccgccgctaaagccgccgcctcttcttcaaacggagctgatagcttgtcgagcggcgtcgacgctattcagatatccgaccggacctgtaccggaatcctctgctctcatccgcagtccagagacattcgtattgaatctctgtctgttacgtttcatggttacgacctgattgttgattcnatgctggagcttaactacgggagacgctacggtctcctcgggctgaacggttgtgggaagtctactctcttaaccgcgattggactcagagagct

SEQ ID NO: 15593 - DNA, 409 bp, Glycine max
  Coding DNA Sequence Number=SeqID_5814
tccgctttctgaatattctacccgcctctttattttgctttgaggccacgcccccatatcttctatcccgatgctcactactaagaagtccgaatccactgggggtggtgacaacggtagcgacccgcagccccctgcctcttcctcttcttcatcctcctcatcgtcgtcgtcttcgtcttcctcggggatcatggcttcgccggatacaggagctggcctagagaggaccccaaggaaaaaggagagggcctcccccggggcagagcatgggtcctcctctgctcctggtatcatggcgggcggggaagggaggcagcccgagacccctgagggccggaggaccagccgcagaaagagggccaaggtggagtatcgcgaaatggatgaaagtttggcaaatctctca

SEQ ID NO: 15594 - DNA, 491 bp, Glycine max
  misc_feature (60)..(60): n is a, c, g, or t
  misc_feature (62)..(62): n is a, c, g, or t
  misc_feature (64)..(64): n is a, c, g, or t
  misc_feature (66)..(66): n is a, c, g, or t
  misc_feature (90)..(90): n is a, c, g, or t
  misc_feature (165)..(165): n is a, c, g, or t
  misc_feature (201)..(201): n is a, c, g, or t
  misc_feature (219)..(219): n is a, c, g, or t
  misc_feature (227)..(227): n is a, c, g, or t
  misc_feature (266)..(266): n is a, c, g, or t
  misc_feature (273)..(273): n is a, c, g, or t
  misc_feature (286)..(286): n is a, c, g, or t
  misc_feature (342)..(342): n is a, c, g, or t
  misc_feature (349)..(349): n is a, c, g, or t
  misc_feature (418)..(418): n is a, c, g, or t
  misc_feature (460)..(460): n is a, c, g, or t
  Coding DNA Sequence Number=SeqID_5815
gatagcggtctaggcgagcagcatcgagatcatctatagtgcagatcactctcccgtacntngngngacgttagtcacatcttaggcacntgcatgatcaattgcgtactgatcactgcggtcgcgtgttgcagtcacagtacgtcttatcacagctagcgctgnagtagcgcgtaaacgtctgagctcgtatcagtgacnagtagatgtggagacganagtagatnatagcaggtgtgagatattacgatcgagatagagacagnggtaagntcttatacatctntcagctggacggtatgacttatcctgttagaggataagagcccagcgagtagaggngagagtnactcatgctgctccctctctgcgtcgtggcctcgtcggtgtgcgagagcaccacgcgaccggctctgcncgtcgcgcgctctcgctcctccgcgccctccgtagatagagncgcgctagcgtacacgaatgtcaaccatcac

SEQ ID NO: 15595 - DNA, 516 bp, Glycine max
  misc_feature (255)..(255): n is a, c, g, or t
  misc_feature (286)..(287): n is a, c, g, or t
  misc_feature (438)..(438): n is a, c, g, or t
  Coding DNA Sequence Number=SeqID_5816
taatattttcgcctcttctccgtttttaacttccccctttctttagcgtcgacgcgctatcgcccgcctcaattctccaagaatgtttgttgtgttataagattatatatgttattctcttcattgctctttatatttttaccggtgttgttcactcagatcactctaccctttttatatccacgctcaccaccccatatcccttctttttcttttgactatgcatacttcattcccctctagtgtaatcgtcgncgtagtccggtagagaggtccgccccgcccnncttttcttcttcgtgctctttcggctcaccgtaattatccactccgcacaaaaaaacaccccattatatttgcctggatcttggtagttggtttgttttagacgctttgtgtaggctacggaggatgtgttctgggctattgtctgttttngagtgtgcgtagggtcattgtgtgtggtgctgaatttttggtgctcattggtggtccgtgtgtagtgtgtttcctgtc

SEQ ID NO: 15596 - DNA, 539 bp, Glycine max
  misc_feature (142)..(142): n is a, c, g, or t
  Coding DNA Sequence Number=SeqID_5817
aaataactgtgataactgaaggtgatagggggtttgttcttattcagcatgtaccttgtcttgtaaactttgttgtttccttcattagcgagtaagcgagaatggatgtcatttagagtgaatggggcacctccaaaggagncaaccttcaggatccttctgacaagaggaaaataatatgtgacgagaagctgaaagaactctttgatgtcgactccttcactggcttcaccgttacaaaactgctggctcctcattttataaagacagagcagtgagttgcttgtacattttattaaggttttctttttgtgtcctgttggcaaggtctggcaacaggaggaatagaaattagtaaaatgacagattttctgtaattttttcttgaagattttaatgttatgtgaccgtttattttgttttaaattatcctgttttgccacttggcagttgaaaattttgtatatttgattcctgaagttgcaaggacaatgttgactttatattctcctgcgccagttggcagaataggagaatac

SEQ ID NO: 15597 - DNA, 515 bp, Glycine max
  misc_feature (42)..(42): n is a, c, g, or t
  misc_feature (59)..(59): n is a, c, g, or t
  misc_feature (114)..(114): n is a, c, g, or t
  misc_feature (118)..(118): n is a, c, g, or t
  misc_feature (126)..(126): n is a, c, g, or t
  misc_feature (130)..(130): n is a, c, g, or t
  misc_feature (149)..(149): n is a, c, g, or t
  misc_feature (167)..(167): n is a, c, g, or t
  misc_feature (231)..(231): n is a, c, g, or t
  misc_feature (269)..(269): n is a, c, g, or t
  misc_feature (272)..(272): n is a, c, g, or t
  misc_feature (278)..(278): n is a, c, g, or t
  misc_feature (368)..(368): n is a, c, g, or t
  misc_feature (378)..(378): n is a, c, g, or t
  misc_feature (383)..(383): n is a, c, g, or t
  misc_feature (394)..(394): n is a, c, g, or t
  misc_feature (445)..(445): n is a, c, g, or t
  misc_feature (449)..(449): n is a, c, g, or t
  misc_feature (452)..(452): n is a, c, g, or t
  misc_feature (468)..(468): n is a, c, g, or t
  misc_feature (475)..(475): n is a, c, g, or t
  misc_feature (479)..(479): n is a, c, g, or t
  Coding DNA Sequence Number=SeqID_5818
aggacatccttcactgatgtgtcattgtgctaacgcatggtnctgcacgatacatcacngactatctgcactgcccgacgatgcagtagtgtacgtgctgagcttcactccgcngatncctgctantgcnatcggtatgtacgtatacntcgtcatactagctctgntgcttcagtcgttgctacatacgtcgctcactctctgcgtctactactcactgctactcgcgancacgtaactacacgactcattagcacacatatcacgantanagtctncgatacgactagtgtaccctttattacactgagatcacgatccaaatcgtactgctcatctccagctcgcgactagatcatctgatgatnctagactatntcctncatcgtcagcnttgtagatactagcgatcagagtactcgacatcgtcatcgtgacatacgangatnacngctagcactcagcctnctactcncatntcatcagccgcatgcccgacgctagatgaacacttc

SEQ ID NO: 15598 - DNA, 348 bp, Glycine max
  Coding DNA Sequence Number=SeqID_5819
gcgcgtaagggctcagcagccgaatacgagcagaaccgactcgacggtgatcgcttagcaagatggggcggagctttattagagttgtgtcaaggacagagtgctcctggatcgaagaaaatgagcccagaggctgggtcaaagctaaaggacgcgcttgcggtgaatcccaagaagcatggttttttttggaggctgggaagcgctcacacttgaccaccgtttttagtttcggaaccggacgaagcccacgtttatttgggtacggcagctgagtacttgtcggccgctgtggaggaggacccgtcgaatgaactttaccgcaaatcgttggaagtggctgcgtag

SEQ ID NO: 15599 - DNA, 509 bp, Glycine max
  Coding DNA Sequence Number=SeqID_5820
tccttccgtcaccatggctttcaaggttattgtcgctctctccgtgctggctgttgccgccgccctgccccagtaccactccggctacgccccagcccctaagtacgcacctgctccagcccctgcttacaagtcgtacgcccccaagtacgaagagcctgcgcctgctcatcccaagtacgagttcgagtactccgtcaacgacccccacacctacgacatcaagagccagaaggagagccgagacggagactacgtgaagggagtgtacgagctggtggagcctgacggttccaagcgtatcgtcgagtactccgacgacggctacggcttccaggctgtcgtacacaaggaggccggcaagggctacgccgcccctgcttactccgcacccgccccagcttacgccgctcctgcgtactcagcaccttcttactccgcccctaagtactcacctgccccatcatacagcaagtactaggaagtctacgtttacactatcatcatca

SEQ ID NO: 15600 - DNA, 549 bp, Glycine max
  misc_feature (52)..(52): n is a, c, g, or t
  misc_feature (99)..(99): n is a, c, g, or t
  misc_feature (114)..(114): n is a, c, g, or t
  misc_feature (132)..(132): n is a, c, g, or t
  misc_feature (138)..(138): n is a, c, g, or t
  misc_feature (351)..(351): n is a, c, g, or t
  misc_feature (378)..(378): n is a, c, g, or t
  misc_feature (383)..(383): n is a, c, g, or t
  misc_feature (432)..(432): n is a, c, g, or t
  misc_feature (452)..(452): n is a, c, g, or t
  Coding DNA Sequence Number=SeqID_5821
ttcttcctctctacgacgtgatagaactagatcaatctatatcatacagccntctcacacctctccctattattatactacgtgattctatacgatatnactcactctctccancttccatgagatgtggcntagctnttgtgatgtattacctgtgcatgtggtggtgcgtgatgtgtcctctcgaccgcgtatcctgccgcgctctcgtgattacgtacagtgatcggactcatgagtgagatgttgtgttcttgtgtgttatctatacgctatactattgtgagagtgtgttgtatctatagaatgatccggagacgctgcttcatccacagttatctacactatatntgatacgacgcagactggaaggagctnttaangatgtctgttatctacttatgccgttgttgtatgttgtgatatgaaatntcactctatcaactgtcttnatcgtacggtataatatgatattttcatcgatgctcttgttagactgtcctatcgcgctcttgcgagctacactcgactcatgtatgcgtgtctagt

SEQ ID NO: 15601 - DNA, 493 bp, Glycine max
  Coding DNA Sequence Number=SeqID_5822
aatggcaggtgatatagatgagacatgtgagccaaagccagatttgaataaattgaaagatcaaaataaaaaattagctcaagaagtttatgaacttcaactgaaaattcaaaatcaagaaacagaaaaagagaataataaaaatcatttgaatcatcacaataatggagaagtcgaaaaactactgtcaaatctatcacaaagagagactgaatttgagaatatcaaacagagttttatcagcaaatggctaactgcaaatgaaaaacttgcttcggcagaacaaaaatgcagcaaattagttgaagaaaatacacaattacgcaatcaagtcgaagcaaatgacaacaaaaacggagaatttgaaatgagatcgactgttcattctacaagtgataaactatatcacctgattaagcaataatatcctttgaatgatctctccaaaatgctgagtctactgaaacaactttttggtacagaaatggtagca

SEQ ID NO: 15602 - DNA, 498 bp, Glycine max
  misc_feature (73)..(73): n is a, c, g, or t
  misc_feature (78)..(79): n is a, c, g, or t
  misc_feature (101)..(101): n is a, c, g, or t
  misc_feature (108)..(108): n is a, c, g, or t
  misc_feature (391)..(391): n is a, c, g, or t
  misc_feature (456)..(456): n is a, c, g, or t
  misc_feature (460)..(460): n is a, c, g, or t
  Coding DNA Sequence Number=SeqID_5823
agcattttcacacctccgttatttgttgtttcctccacacgcgataatacacatcggagagaagaaccacganttccnncacgcctccacccactttctcntctcacnctcccgaggctacccaccccgacgtcattgcaatatttgtatgtgtccaacagctattgttatcaccgttgtttctcccacactcttctaccccaccccactcccctctctctttctctaccagagaatatatgagttctttagaattattgtagttgtcccacccactagcgacaaccagacgcgatcagcgcgattgatctgggtacggcagcgatgacgagatgaaaagaatagcgggagtcccacagaggcaaacagcgtagagcgtacccatcggcancacccaaccccacagtattgaaatattacgccagatctatcgagcatacaccttattattgcagnggcntcacgccaaccccagtgagaccccacaccgtgagatgc

SEQ ID NO: 15603 - DNA, 426 bp, Glycine max
  misc_feature (55)..(55): n is a, c, g, or t
  misc_feature (163)..(163): n is a, c, g, or t
  misc_feature (238)..(238): n is a, c, g, or t
  misc_feature (266)..(266): n is a, c, g, or t
  misc_feature (268)..(268): n is a, c, g, or t
  misc_feature (301)..(301): n is a, c, g, or t
  misc_feature (303)..(303): n is a, c, g, or t
  misc_feature (339)..(339): n is a, c, g, or t
  misc_feature (396)..(401): n is a, c, g, or t
  Coding DNA Sequence Number=SeqID_5824
gtacatgaactattgctgagtgtgctagaggacgcgtcatagctcctcggactgngatgtagatctctgtagctctatcgtgtcgtgactgcaacaactctacctgggagatcccgaggctctggtcaggcagagtgctctatcttagtgaggctatgacganactactacgtcagtctgtgcagtgcacgactatacagagcgagtatatatgtatgctcctcgttgtggtggaatntcagagaaagaaacaaagatatagacangnagggcattctctctcctctcgctcgcgcgcgtngnggtgtctttctctccacttagtctatatatgggagngcgggacgcgcgctcaccccgcggaggtgaggggcgcacccatcgcctattggaaannnnnnccattctgtctatgcggcgccggct

SEQ ID NO: 15604 - DNA, 581 bp, Glycine max
  misc_feature (262)..(262): n is a, c, g, or t
  misc_feature (266)..(266): n is a, c, g, or t
  misc_feature (349)..(349): n is a, c, g, or t
  misc_feature (391)..(391): n is a, c, g, or t
  misc_feature (403)..(403): n is a, c, g, or t
  misc_feature (448)..(448): n is a, c, g, or t
  misc_feature (457)..(457): n is a, c, g, or t
  misc_feature (500)..(500): n is a, c, g, or t
  misc_feature (502)..(502): n is a, c, g, or t
  misc_feature (508)..(509): n is a, c, g, or t
  misc_feature (524)..(524): n is a, c, g, or t
  misc_feature (528)..(532): n is a, c, g, or t
  misc_feature (535)..(535): n is a, c, g, or t
  misc_feature (538)..(548): n is a, c, g, or t
  misc_feature (554)..(554): n is a, c, g, or t
  Coding DNA Sequence Number=SeqID_5825
gccatccgtcgttaactacttataaaatatacctatatctattcgtgtatatatacacagaatgattctccaattagatagaacagtgcacgactatgttagtacacatagtctcaacacgaacgacatacaatgaccatcacccacgctcgaacactatacatctcacctatagcattgataggagagcacacaggacagaacgtacgttcacagccgaacagaataaagtgaacagaagagagcacacacacacgcgagnccgngggctgcgcggtcgcgccatgtcgcacactgggagacagtggctggccattttttggtatgttgtgcggtggaaaagaataanacacatacacactcacactcgtctgctacatcaccagcgagncaagcaaataanaacatacaacaaacacacaccataagcatgacgactaagtagtgntttattcanaacaacgataatacacatcgacgcctccgctggatgggtcggngnacgcgnngagccgcccagattngagnnnnngancannnnnnnnnnngtggcnctctctgcgtgcgcatacaagaggaga

SEQ ID NO: 15605 - DNA, 144 bp, Glycine max
  Coding DNA Sequence Number=SeqID_5826
caagaacaccaataagacccatgagagcttacacctgcttgctcttgccatgaacatcggcagatacacccttggatataagaccgaatctacatctcttaggatctccaaagggagatcgattataattgcttacaactgccc

SEQ ID NO: 15606 - DNA, 484 bp, Glycine max
  Coding DNA Sequence Number=SeqID_5827
aatacgacacgagcatggaatgattatgtaagaacgcagtccaggcgctcgaaattacgacatcgccgggtgtcattattgatgatgtatccacaagttctgcccttttcacccttgtttcttttctccactgatattgtattaggaatactcttcagtcacttaaattaacttttaccaatttctcgtctttcgccacccccattgatctgtagcccccttgctcccagttgtcctttcgctcgctgacccattctaacgatccccctctttctctcttaagttttttttcgcagattaggatatacccgggggcataggtatatatgtctcgccgcacatacccacacacgcgtgggtatggagaagggcccatgccccgagacggtgacaaatagagaattttaatcaatcgattacaattctcacgtttcgggcgcgtccgttttcagtggtgttgcgctcggtttcacccattttaaat

SEQ ID NO: 15607 - DNA, 437 bp, Glycine max
  Coding DNA Sequence Number=SeqID_5828
ggttcaagatcaactcaagggcatggaaaccaaggaaaagaagaaggagaatgacatgaaaaccaagatcatgcaagaaaagtactccagagataagcaacttcaagatgaaaacatcagaaagaagttggacaagagagccgaaaaagaaatggatgagctcttggtcaacaagatccgtcacgaattagacgaagaagccagagctgctgccaacaggcgtgttgaagataagcaacaactcaagaaggtcctcactgaaaacgaagattacaagaaaaagatggctgatgaagctcgtagagaaaaggaagctgatatcaaggctcaacaagagtacaccagactcattgagaaacaaatggctgatagagaagctgaaatcaaggccagagaagacagagccaagaagttcatgaacatgatggctgataccg

SEQ ID NO: 15608 - DNA, 394 bp, Glycine max
  misc_feature (267)..(267): n is a, c, g, or t
  misc_feature (275)..(275): n is a, c, g, or t
  misc_feature (313)..(313): n is a, c, g, or t
  misc_feature (333)..(333): n is a, c, g, or t
  misc_feature (342)..(342): n is a, c, g, or t
  misc_feature (344)..(345): n is a, c, g, or t
  Coding DNA Sequence Number=SeqID_5829
gcttcgttgttatattcaacttcttttgacacttaccatgctgtaaggttcattatatcccctgaattaggttaacgaagagattgaacaaaacattacagtgttcgggaatgcaccaagtcaaaccacatcttttgttttggtttggagggaatacgtgcttggttgttatattcaacttcttttgacacttaccatgctgtaaggttcattatatcccctgaattaggttaatgaagagattgaacagaacatacagatgaccanggaaatanaatcatagatagtgcaacattcttgaaaccgaaaagcnctatctcaacaaggagtctnagttgacanannaagtatcagttactgagcttgaactcaatggtcttatccaagtggctgg

SEQ ID NO: 15609 - DNA, 530 bp, Glycine max
  Coding DNA Sequence Number=SeqID_5830
atcctcccacgttgttcttgcatatcccatatgctctactatgaggtttgatcatgtactcacgatgtgtaaacaagattcatgatcttctccggcacgactaacacggatataccaggggatatactccgtgggttgtgttgcgacgctcgtcaataactacggggggggtgttggcacactaagtcgcgtaagagatagaagacaagttacatgctattatgatgtggttttgatatgtgattacgtgtgtgatacagcgcgcgttacacatatacccgaggcctaacgacgtcgcggcccggccggggcgagcacaagatgataaatatgtgcggtgggggtgttggcgtcatcacaccataccgggcacatcggcgggcgtcgggaaaaaaggtacgcccgggcacaacatagtcgcgggccgccggcgcgagccacaccaccacggcgtacaacacgcgcccacataataggtggtataagtagatagggcggcgtggaaggcataccagaatacggtgcttcta

SEQ ID NO: 15610 - DNA, 307 bp, Glycine max
  misc_feature (121)..(121): n is a, c, g, or t
  Coding DNA Sequence Number=SeqID_5831
gcttgagaagttgaaggtccttggaactctgaacattttggttggagaatgctcagaaattagtgataaaggagtcaatattatatctgaaaatttagaaacattgactctgttaaagaanatctacttgaatatttcaaaatgtttaaaggtaacagatagagggatgaatcgacttgcagaaagcatgaaaaagctggacttacaagaaatttgtcttggaattagccagagtggaatcctaagcgtggattaaagaatttaagaaatgaggctttgtcatttcgagttgttgcttacaggataa

SEQ ID NO: 15611 - DNA, 368 bp, Glycine max
  Coding DNA Sequence Number=SeqID_5832
aaatctcttgctgcatgtcaaaccctctctctctctcactcatgacaccctctagcagatgctgattcctgaagcttctttggaaaccctcaaaaatagttatccttttatagcctttcggtgattagtttcacctgctttcgctctctttcctctgctttccctttacccttcccctaaacacattacacatcatagagaaaaggatctagcgcagtccagccacaatgttaaatttagtctccctcactttgcataattgttccttcagtttcggaagatgcacctagctcatacacaccctacacaaacaaaacacacgaccaaaagctaaagctgcaatttctgacttctcaatcccataattc

SEQ ID NO: 15612 - DNA, 565 bp, Glycine max
  misc_feature (36)..(36): n is a, c, g, or t
  misc_feature (197)..(197): n is a, c, g, or t
  misc_feature (219)..(219): n is a, c, g, or t
  misc_feature (250)..(250): n is a, c, g, or t
  misc_feature (270)..(270): n is a, c, g, or t
  misc_feature (277)..(277): n is a, c, g, or t
  misc_feature (293)..(293): n is a, c, g, or t
  misc_feature (331)..(331): n is a, c, g, or t
  misc_feature (363)..(363): n is a, c, g, or t
  misc_feature (372)..(372): n is a, c, g, or t
  misc_feature (426)..(426): n is a, c, g, or t
  misc_feature (462)..(462): n is a, c, g, or t
  misc_feature (471)..(471): n is a, c, g, or t
  misc_feature (536)..(536): n is a, c, g, or t
  misc_feature (540)..(540): n is a, c, g, or t
  Coding DNA Sequence Number=SeqID_5833
ctgctatgtggacgtcgtctgatagggacgatctancagcgcggaatacatagcaaatgcatagtatgatctgcagatcatatatattatctacactatagttgtatgaactactgagatgcatctgatcatgtagagagacgatagctactcgcatcgtataagtacgtatacgaagtaatacgcgatgtcgatcnagttgagatgtagtgtcgagtngtagtgactctattattatatgatcatactnatgagcgtcactcatatatncatacanactctgtatgtgatantatgtacactatatctagtcgacaaaagcagaatcatnttatgttgtcacatgagaaaagtacatcgtgncgacatcgncgaatatacaagtatgattatatggacgtgttgacgacgaatcaattgagaagngcgcggtctgagcgttactgtctagtattatatgancatgtagtnatatgtgatgtatgtactaatgtgtgtgagacgcgagagtcggctttatatacggtgtcaccganattnatgtctacttatatagacgcgcgag

SEQ ID NO: 15613 - DNA, 571 bp, Glycine max
  misc_feature (148)..(148): n is a, c, g, or t
  misc_feature (402)..(403): n is a, c, g, or t
  misc_feature (483)..(483): n is a, c, g, or t
  misc_feature (530)..(530): n is a, c, g, or t
  Coding DNA Sequence Number=SeqID_5834
atatagcgacggcagaacacagagcgtacgaccgagcgacgaccgccactcgatatcctccctgcgccgcgacctttctgcgtcggtgttgctgttgcatgtggagtgatctatcacgtgtgagagtgtgtatgatagatgtgcgcanggatactaggagagagacgtgcacggcggaagagcagtgtgagtcatggtcggatttgttcgtcggtcgcgtatgatctagtattatatcgtacgtcgcgcgtgcgccatccgcgtggagaggagtagatgactataccggctatcggagtacagaatacagttagtaagaacccacacagcatgctttgttctatgcgtgtggtgcagtaccgatggctatatcatgatccatacaccctcggcgccacaaannaacccatctaccatcacagtcttcgattcgctcatcttccgccctcactctcctcacgccctcgcatgatggtagcctantggagatgtgtcgaatgtgatgatgtcgaagtgaaatatagaagaanagatatgataattcattctacgataacatgtggtctcactc

SEQ ID NO: 15614 - DNA, 516 bp, Glycine max
  Coding DNA Sequence Number=SeqID_5835
ggtacctggaggagatgcgccaccacagcggcggcagcggcaggtcgtccaccaccgcgaccagcacgctgtcatcgtcatccccgaccacgcctaggtcttcccggcctcatgggtgccggccggcggaggagctgctgcgggaggccaaggccaaggggagcctggtggagcgcatagcgttcctggaggaccgggtgctccggatggaggaggagcgcatggatctgtcgtccagcatggatacggcggagcagaccacgccgacctcgtcggggaggaggacgatgaggatgatgatgagcggcagcggcggggccggggatgagcatgggagtggcgggagcgggaagaaagggaagaaggggctcaagagcttggtcaagtcatgcgtccgagcaggcgccaagctcaagaccaaggaatagtctagtctttcttttgtttctttattattagtcgtgtgtgtacgtgcatatgttcacgtgtacgtacaccatgtacagtaaacgtatg

SEQ ID NO: 15615 - DNA, 539 bp, Glycine max
  misc_feature (94)..(94): n is a, c, g, or t
  misc_feature (146)..(146): n is a, c, g, or t
  misc_feature (153)..(153): n is a, c, g, or t
  misc_feature (258)..(258): n is a, c, g, or t
  misc_feature (270)..(270): n is a, c, g, or t
  misc_feature (276)..(277): n is a, c, g, or t
  misc_feature (319)..(321): n is a, c, g, or t
  misc_feature (338)..(338): n is a, c, g, or t
  misc_feature (344)..(344): n is a, c, g, or t
  misc_feature (459)..(459): n is a, c, g, or t
  misc_feature (463)..(463): n is a, c, g, or t
  misc_feature (466)..(466): n is a, c, g, or t
  Coding DNA Sequence Number=SeqID_5836
gcagatagacgtccgtcgccgctgcccctcacgtaccgatcctctgtcttcgctcgtctgcgcctgcgctcgctctccgatctctcgcgcgctnctctcatcatatatcctatctccccgtacgtcacccatcgcatcccttctantgtatancacgcgacgtttgtcgccgtcttctctccgcgctcctccgccacacgcggctgttggagagtgctcttattatattcaccgcaccacacccctgagaccttactncacacccactanaacggnnaagaacaaataatatttatgtggctggctgctcgtcgccctnnncctcgctctctgctccnccgccncgcctctcacgacgtctctctatgcgacgggtgacgatgcgggtcacatcgtgtagacgtgtgcagcctatctgcgttcgggcgagcgtgtgtggtaccctcgcactctctcgtngcgnggntgtgtgtgcgtaagatgatcgtggcgtacgcactcccgctcacgcgcgttgttcgctgtcgttctctctctca

SEQ ID NO: 15616 - DNA, 590 bp, Glycine max
  misc_feature (29)..(29): n is a, c, g, or t
  misc_feature (52)..(52): n is a, c, g, or t
  misc_feature (108)..(108): n is a, c, g, or t
  misc_feature (130)..(130): n is a, c, g, or t
  misc_feature (201)..(201): n is a, c, g, or t
  misc_feature (208)..(208): n is a, c, g, or t
  misc_feature (234)..(234): n is a, c, g, or t
  misc_feature (248)..(248): n is a, c, g, or t
  misc_feature (334)..(334): n is a, c, g, or t
  misc_feature (340)..(340): n is a, c, g, or t
  misc_feature (349)..(349): n is a, c, g, or t
  misc_feature (366)..(366): n is a, c, g, or t
  misc_feature (394)..(394): n is a, c, g, or t
  misc_feature (433)..(434): n is a, c, g, or t
  misc_feature (455)..(455): n is a, c, g, or t
  misc_feature (459)..(459): n is a, c, g, or t
  misc_feature (485)..(485): n is a, c, g, or t
  misc_feature (512)..(512): n is a, c, g, or t
  misc_feature (515)..(515): n is a, c, g, or t
  misc_feature (523)..(523): n is a, c, g, or t
  misc_feature (553)..(553): n is a, c, g, or t
  Coding DNA Sequence Number=SeqID_5837
gattactctcatcattatctctagctacnacgctgatatcatagctccgtgnacgccacactgcgctcaactcatctctgtgtattgttatatactgctgcgcacccntcctctcgcagacaacttgtgntcgaagcgcatgctctcactacagtgtgatgcagtcgactacgtgtgcgagacgtgcgacacgtacgctgngtacatnatctcgctcgttgatgagtgatgacncgtatttgcgttgntacgtgcgaaagtacgcgtgtaactcgacgactgctgcgagtactataacgtgatcataatcagactagactagttacgacctacnctacanctcctgcgntacgtcgctacatacantgactatcgagagcgtacacactactcntgagtgatgctgcagatgatcaagtaccagtctgatcannactatgcagcatacgacgcgngttnaaagcacacatgctgacataatccantgacctgactgcatatatactaacaanacnagccggcnacgactgtcgatatctgacgtgcggctctnctgatctatatatatcatacgcgtatatcgtcgctcg

SEQ ID NO: 15617 - DNA, 357 bp, Glycine max
  Coding DNA Sequence Number=SeqID_5838
tccgatccatggattcatcccaatttgttgctagatcctgccaagggtggaggacggggtgagaagggggatttgcggcggagtgcggtggctgcaggttctcggcggcggcaggtcctccagcttgaccacacgttcctgctgctcgctgccgccgtccattggatggccatggagctgggcccctttgaacttgaacggtggctctcctctagagagtccacaggaggaggcaggtcgtgggcttcctatttgctactgtggcagcttccacctatgtaatgtgctacaactttgcatcattcctactttctgcacacggctgattcgtcacagaccttgatgattcagtgagag

SEQ ID NO: 15618 - DNA, 276 bp, Glycine max
  misc_feature (42)..(42): n is a, c, g, or t
  Coding DNA Sequence Number=SeqID_5839
ttcgggatcgaaatcaagcctctttattgggaagtggataanccccactctctcaactattcaactttcaagaattggctggaatcacacgcagtggttataaagaggatcctggcttgggatcacccgaaaaggctgggtatgggccattggccgagatggatcgaacacggccggcgcatatattaatttcccacgaaatggggttcccacttcttggaatggacctaacttaagttgagagagaaattcaaatccggatacccctggctggtg

SEQ ID NO: 15619 - DNA, 584 bp, Glycine max
  misc_feature (264)..(264): n is a, c, g, or t
  misc_feature (435)..(435): n is a, c, g, or t
  misc_feature (514)..(514): n is a, c, g, or t
  misc_feature (526)..(526): n is a, c, g, or t
  misc_feature (556)..(556): n is a, c, g, or t
  Coding DNA Sequence Number=SeqID_5840
actactagcctataccacgagattcacccgcttacgatctgcagtgacgccgctcgagtagacgccttgcacacaacgatacagcatgtagcttgctcaactatccgcgtcgtctctacagacagcacaacagccgcgatgtatctccgcgtcctatacatcgatgtacttggaccgtaatgtgaatagtgtaccctacgcacaacacctcacttattgcgtccgaccctcccgcgcccgatccctgcgaatgacgtacatacngtatgctagctacgcacgcgattcgatgtatttctgtctgatttacatcggagtaatatatctacatcgatcacccggtgctccgccgccgtcccaatcgtacacgactccacatgccgcacacgcagcagcgagtgtacacggtgagtgatggtctgaatgcgctgctgnaggacacgcctaatgatatagcacactctcttatgctaatggtgagagacgaagccgtactccatagtcggacgtatgngcaatcgatatngcattgtatgattgtgatcatagatctcanactaatacgcctacctatgattactgct

SEQ ID NO: 15620 - DNA, 509 bp, Glycine max
  misc_feature (38)..(38): n is a, c, g, or t
  misc_feature (53)..(53): n is a, c, g, or t
  misc_feature (66)..(66): n is a, c, g, or t
  misc_feature (104)..(104): n is a, c, g, or t
  misc_feature (108)..(108): n is a, c, g, or t
  misc_feature (127)..(127): n is a, c, g, or t
  misc_feature (133)..(133): n is a, c, g, or t
  misc_feature (143)..(143): n is a, c, g, or t
  misc_feature (158)..(158): n is a, c, g, or t
  misc_feature (176)..(176): n is a, c, g, or t
  misc_feature (178)..(178): n is a, c, g, or t
  misc_feature (204)..(204): n is a, c, g, or t
  misc_feature (229)..(229): n is a, c, g, or t
  misc_feature (284)..(284): n is a, c, g, or t
  misc_feature (286)..(286): n is a, c, g, or t
  misc_feature (288)..(288): n is a, c, g, or t
  misc_feature (295)..(295): n is a, c, g, or t
  misc_feature (318)..(318): n is a, c, g, or t
  misc_feature (320)..(322): n is a, c, g, or t
  misc_feature (325)..(325): n is a, c, g, or t
  misc_feature (339)..(339): n is a, c, g, or t
  misc_feature (343)..(343): n is a, c, g, or t
  misc_feature (348)..(348): n is a, c, g, or t
  misc_feature (359)..(359): n is a, c, g, or t
  misc_feature (445)..(445): n is a, c, g, or t
  misc_feature (461)..(462): n is a, c, g, or t
  Coding DNA Sequence Number=SeqID_5841
gtgtctgagctcctgtccgtctgcacgtgcgctggccnctagctgtatcttgntgttagctccttngtactatgagctgagcagctcgttctctcgtcgcgtgnccgncgcgtgctgatggcgtgcngcaatngtctgcttcncaaacatgcacactntcgctgccacgtgttacntnctactgcggttctctgcaccgtgcgntgttgaagaaatctcactacatggntagtcgagaactgtacgccgggagagctgtcatagtatatacatcacatgcgtgncncntatactntctcaacgaaggcgaatcagcancnnnccnagctctacccccancacntctcnaacgtgttatncattactgtagtcaatatatactgtggtgtatgcaagagtagagacacacgatctgactcactcagctagctcgacatgacgacgnacgcatgacgacgcgnngcaagtacgagaaatgactacatgaacactaataatcatagcgatga

SEQ ID NO: 15621 - DNA, 552 bp, Glycine max
  misc_feature (75)..(75): n is a, c, g, or t
  misc_feature (115)..(115): n is a, c, g, or t
  misc_feature (117)..(117): n is a, c, g, or t
  misc_feature (185)..(185): n is a, c, g, or t
  misc_feature (188)..(188): n is a, c, g, or t
  misc_feature (222)..(223): n is a, c, g, or t
  misc_feature (255)..(255): n is a, c, g, or t
  misc_feature (262)..(262): n is a, c, g, or t
  misc_feature (299)..(299): n is a, c, g, or t
  misc_feature (376)..(376): n is a, c, g, or t
  misc_feature (383)..(383): n is a, c, g, or t
  misc_feature (428)..(428): n is a, c, g, or t
  misc_feature (447)..(447): n is a, c, g, or t
  misc_feature (451)..(451): n is a, c, g, or t
  misc_feature (500)..(500): n is a, c, g, or t
  Coding DNA Sequence Number=SeqID_5842
tcacggccgcggattatcttaattgcacgcagggaggggatcctccgcgcgtctcttcggtgcgggcgcggttangcgccaccgcgggatcggtgcgtacataaacaatatcggngnagaggacggcgtgagcctatcgcgcggcgattattggttttacgccgcgcggcgagaggttgaattanaanctctcgccactcactgccgcccgcggcaaggtcnntcatggtgtaagccttggtgtgcgcggcgtantatatcntgaatgtggcgctgcatccctggctattggtcccccngtgaagtaaaatgagtgctcatacgtataagatgcggcgcgcgctaacagaccgctaccgccgtcggcgaagatgcnaacgatngtgcggtcgttggataagaagtgacgcctagagctcggcgtctcnatcagagcgcacaccttcntctnttcttgctcgtctcgagtgcgccagccgagcaggagatacgtagagagnaccagacagcatcgtcgtgcgcgctccagaagcagaccgtagggttccgcac

SEQ ID NO: 15622 - DNA, 554 bp, Glycine max
  misc_feature (26)..(26): n is a, c, g, or t
  misc_feature (91)..(91): n is a, c, g, or t
  misc_feature (294)..(294): n is a, c, g, or t
  misc_feature (320)..(320): n is a, c, g, or t
  misc_feature (356)..(356): n is a, c, g, or t
  misc_feature (402)..(402): n is a, c, g, or t
  misc_feature (442)..(442): n is a, c, g, or t
  misc_feature (445)..(445): n is a, c, g, or t
  misc_feature (447)..(447): n is a, c, g, or t
  misc_feature (501)..(501): n is a, c, g, or t
  Coding DNA Sequence Number=SeqID_5843
cccggaagtcattactccatctttcnacacgcctcacaccctcccgccgcacgcgatatacgatagtcatataagtagtgacggtagaacngtactactcctctacctccacacctcttcactgcgcacgtatctcactgactactacctgcgggtcgcgacgacaacggacgagcctcactcactacactcatcactatctatcttacactctatgactattaccacgcatacgtgatgactagcacacactacatcaataatcatgtcacctactgagcgcaccgctctggngccgcggcacgcgatgctgtgagctnaccgtcgatgtgacattctctcatatccacacgcantcgtatgtagcgtcagatgagtatcacatatgtccacttcagtatncgcattgactactcacgtgagtagtagcagtgataacttngcnanctacactatcgatcgacctctcgcagcgtcgaatgatacgctgtcactgcgatngctacgactagtacattatcactcgacattaatgtaagtctcccaacgcgtga

SEQ ID NO: 15623 - DNA, 448 bp, Glycine max
  Coding DNA Sequence Number=SeqID_5844
ctaccactttgttcacgaatgcatgaggaatcacaagaaggacatcagtggacaccctaaggctcttatgaggttgaggactgcctgtgaaagggcgaataggaccctattatctactgctcaaaccacaattgaaatagattctctttatgatggtgctgacttctacacaacaatcacccccgccacgtttgacgagctcatcatagatctcttctatactcatatgcagcccgttaccaagtgctcagacggatgctaagatggacaagagcactgcccatgacgatgtccttgctagcggatccactagaatgcctaaagtgcagctatagatccctgattccttcactgcacacggacctttgcctgatcattacacccgatgaggccggtgcttatagagcagctgccaggctgctattgagactctcgaccgcaacaagaa

SEQ ID NO: 15624 - DNA, 542 bp, Glycine max
  misc_feature (72)..(72): n is a, c, g, or t
  misc_feature (506)..(506): n is a, c, g, or t
  misc_feature (511)..(511): n is a, c, g, or t
  Coding DNA Sequence Number=SeqID_5845
atgtgattgttaacgacgcgcgagatgcgaggaaacgcaccagtcagacacacgcctaacactcagaactgntcacgctcgggctcggcgtattagagtatgatatttctagtgtagttatagcatatatatagcagctgctcctactatattatgtgtagtatgatatatgcttactatgacgcgtatagatgattgttgttagctcaaactatgatgacataatagacatcaatgagaggatgttgagagcgtcatacagcatcaagatgtactcgcgtgtatgtgtagtctgagatcatgatatagtgcgtgtgtgtgtgtgtccactatcgtgcgagcaatactcggtgctgatgaggctctatgtatggttctagatgaagatagtcatgtactaactcctacagtgtcagagagtacgatagctggagctcataagcaggcacactcactctctcgaagtagacacttcgtttcacgtcgtattgatcgcttgctgttgngctcncgcctgcctatcgagcgagtgcgttggagat

SEQ ID NO: 15625 - DNA, 321 bp, Glycine max
  misc_feature (102)..(102): n is a, c, g, or t
  misc_feature (119)..(120): n is a, c, g, or t
  misc_feature (127)..(128): n is a, c, g, or t
  misc_feature (189)..(189): n is a, c, g, or t
  Coding DNA Sequence Number=SeqID_5846
taacagcgccatagcgttctctaagctatcgtgcgaggtccctcgacctccgcacaccccagcaccaggggctgtgcctgtcgtcgtcttccacgccatgtncgaacccgacaccaggnngcgccgnncgctccgtttctggctcagcgccgccgcttctggagtcgggtcgccgttctcaagcaaggncgtggtccccggacccctccgggaacaagggtggctcccccgaagggggactggaaaaacccccccataaaacggcaccgaaagggcggggacaagtttaaggcgcgcatcggtaaggttttggatcaatcc

SEQ ID NO: 15626 - DNA, 500 bp, Glycine max
  misc_feature (62)..(62): n is a, c, g, or t
  misc_feature (93)..(93): n is a, c, g, or t
  misc_feature (174)..(174): n is a, c, g, or t
  misc_feature (238)..(238): n is a, c, g, or t
  misc_feature (252)..(252): n is a, c, g, or t
  misc_feature (263)..(263): n is a, c, g, or t
  misc_feature (322)..(322): n is a, c, g, or t
  misc_feature (453)..(453): n is a, c, g, or t
  Coding DNA Sequence Number=SeqID_5847
gagcggcagacctgatggcgactctcttcctcatcttactatttgtcagctcgtagtggatnaggaattagtactggattctggatttgaatnttaccgcccgcacgctcccctgcaacgactctcggataagtacactagaatagatgacgattgatagttgtgtcgtcctancatcatctcctcactaccctaccacaagctatgaagtaaccaacgacactcgagtcaacatcancaaattttactctnttacctcctcncacgctcgtacttgcagcgccccctatgcgtcgtcgtgattgtgatatagaatatcgcncaccacaccccacacaccctcaacaccctccttgctagagactcacgctggaggaatgagagcaagagagggaggtgttggttaatataaacacatcccaaccaatcaatgctctctcccttctcgctgcngcgagggagaaccatctaaaatgtatataggagaaggcctgtgtcat

SEQ ID NO: 15627 - DNA, 571 bp, Glycine max
  Coding DNA Sequence Number=SeqID_5848
ttatgcaaagaactactccgctgtgatacaaataaacaagggtgtagtacaaaatgttacttgggataataaatgctcgacttgtgactttaataaatgttataaagcttattacaatgggacattgtttgatgctgtgtgcttcgaagatgagtgcataaaaccttctgaagttaagcatgactgtgatcctcagatttatatatcatggattggctcagataaagatgatgagaaaatgactagtgctggaatgagagtcgctagatttaatcaattttcatggaatcagataattaatgatgctcaaatttatatgaacacaaatcaagttcttgctgaaaatgctgagtctcaggatttcctaattgagacaaaatagaaaagagaataaaataaaataacaaacaatatgttcatgagagaatgtaaaggttaacaagaggagatacatcttaatgtatatttttcttgttaagattgagacttttttataaagtagcattcattatttattcaagagatactctgcaatcacaaacttgagaaagtgtgaatatcttcgtttata

SEQ ID NO: 15628 - DNA, 471 bp, Glycine max
  Coding DNA Sequence Number=SeqID_5849
cgtcgattcgaaccaggagcggcacgggtagaggcgcagggcgaggagcgtccgccggaggtgctcgatgccccccttctacatccattgtaggcgctcctccgtcgctcctccccctccatcgtcaggaggggctcggctgcagttctactccaggctccgcatccaagcagttgccaccgatgggaatacagccagtggacaggttttgcttgtcagcgaccggaacaagaacaagtcaatgcttatctgtacatattcaactttgtggatgattggaggctttgtgttcatagtttatatgggtcatctttatatctgggccgtggtcgctgtattggtctatcattcatctaccggttaattgaccatagataggttatggcattaataggatatattttgcttttttccttcacagaagagattattattaggataacaatggctcgatacattgcttgacagaat

SEQ ID NO: 15629 - DNA, 559 bp, Glycine max
  misc_feature (96)..(96): n is a, c, g, or t
  misc_feature (288)..(288): n is a, c, g, or t
  misc_feature (487)..(487): n is a, c, g, or t
  misc_feature (505)..(505): n is a, c, g, or t
  Coding DNA Sequence Number=SeqID_5850
ctgacggagttgtcgtgcgtataatgagcgatctacacatcacacatagcaggcgatcttgttgtcatatacataattgcctattaacgcagcctngtgcgtgtatgtgcagtactgcacatactacacgatgtgtagtgaccagatatgtagacaactatgacggacgtataacatacgattgacacacatctctcgtcgtcttcctcctcagcgcgctgtgctgtctatactcatacatctcgcgtgtgctatgaatgtatgagcctgttgttatgatctaatatntaatatgagtgacgacccgatcgtgatgtacagtgtgatatagtactatgctggcactctcttgtaatgttttgaatctctctctacgacgtcctgattatcggtcgtattcgattctctgcttgtcctcgtacctctgctgtctgtcaccgcggtcgtgagtgagtgtggctatcgcattctcatcgaatcgacgatngattagcatatgtgaatncatatggctcacggacgcgctaattgctgacatctaccttgtgtggtcgtctct

SEQ ID NO: 15630 - DNA, 464 bp, Glycine max
  Coding DNA Sequence Number=SeqID_5851
ttttcagaaccttaggcccactttggcaactacttattctatgctatgctctattattttttttttaatttacgctatatttggctcacttattactctataaaaaatattcgggtactaaaatgttaaatgatacatgacacatagtgagagataaaagaaaaacaatataaatattattagagtatgatgtgattaaaattgaaaaaaaattatcaatgttaattaagataactttcacctaacaactcttgttaaaaataattttatattatttctcagattttcttatgatgtcacatcaagattactgagacggaaaagaatgagagtgagtgtttcgcggttttttttttttacttcacaattgatgcatgaatgatgctcaccaatgatatttttttctttcttttcccccttttgtctgagtcaccatgcaataacggaaaattcagctcgggatt

SEQ ID NO: 15631 - DNA, 361 bp, Glycine max
  Coding DNA Sequence Number=SeqID_5852
agcctcctccgtacgctcaagatgtgcggtagctacggagtcactttcgccgccgtcttaggactctacatcggcctggagcggattgtgcaaattcagcgcaagaagagcgacttcgacaacggggccatcggtggcttcgtctcctgagcctccgactatggctaccgaggacagagcatcacctctgccctcattggagtatctcgcctgagattcacgtgtgccaccctgtacgtagatgagtatactaccagagagcgcgatgtcaaacggcacatgcatacacccggcaataaaggccgagcctgctcactgaccatgcccgctactagaacacagacatggagaccagctcggg

SEQ ID NO: 15632 - DNA, 550 bp, Glycine max
  Coding DNA Sequence Number=SeqID_5853
gaaggtgatcgcttcttgcaagccgctaacgcatgccgattctggccaactggtcgtggtatctaccacaatgacgaaaaaacgttcttggtctggtgcaatgaagaagatcatttgcgtatcatttccatgcaaaagggtggtgacttgggtgaagtctaccgtcgcttggtttctgcagttaacgacattgaaaaacgcatcccattctcacatcatgaacgtcttggttttctcaccttctgcccaaccaacttgggcacaaccatccgtgcttcagtgcacattaaagtgccaaaattggccaaggactacgccaagttggaggaagttgccggtaaatacaatttgcaagttcgtggaacatctggtgaacattcagaatcaattggaggaatctacgatatctccaacaagcgtcgtttgggattgactgaatatcaagccgtcaaagaaatgtcagatggtatccttgagctcatcaagattgaagctagcttgtaaatggcttgagacttcccaccaactttgcccaagagttcgattgatt

SEQ ID NO: 15633 - DNA, 574 bp, Glycine max
  misc_feature (54)..(54): n is a, c, g, or t
  misc_feature (76)..(76): n is a, c, g, or t
  misc_feature (141)..(141): n is a, c, g, or t
  misc_feature (158)..(158): n is a, c, g, or t
  misc_feature (272)..(272): n is a, c, g, or t
  misc_feature (308)..(308): n is a, c, g, or t
  misc_feature (384)..(384): n is a, c, g, or t
  misc_feature (395)..(395): n is a, c, g, or t
  misc_feature (408)..(408): n is a, c, g, or t
  misc_feature (462)..(462): n is a, c, g, or t
  misc_feature (473)..(473): n is a, c, g, or t
  misc_feature (493)..(493): n is a, c, g, or t
  misc_feature (499)..(499): n is a, c, g, or t
  misc_feature (503)..(503): n is a, c, g, or t
  misc_feature (516)..(516): n is a, c, g, or t
  Coding DNA Sequence Number=SeqID_5854
cacggcgtgcgggattcatacgagtgatgtattgtggatatgagattagtggancggataccaccaccgcgctcantcgtgatacagatccgtgcgccactccgtacagcataatcgcgccactactcgccgctcacaacnacgcacagataaataanatgagacgatataacatagcaatgcaggtacgagggtgtcacaagcgcattggcaatacacacgcgttatttcgcaagaataacatggtgcaggtcatatcgtggaacaatacngtcgggcaatatataccggttacgtagtaatacgtngctttggacgaattacggtggtcatcctgcgactacaactgccgtgcacactcgacatagatatcgctgctctacnccagcaacatngcgcgataagagngctgcgtaatacagaagtgtgtgtgaatagtgctgtacaataatacgcggaganagagatatctntggcgtagacctattgctantagcgnacanaaaacttaagatntgcggtgtgataatacggcgtggacacgtgtttatatgcgtgtgctgatatcactaca

SEQ ID NO: 15634 - DNA, 493 bp, Glycine max
  misc_feature (306)..(306): n is a, c, g, or t
  misc_feature (389)..(389): n is a, c, g, or t
  Coding DNA Sequence Number=SeqID_5855
gcaggtgatgcgacctttgtctctatgtcaaatcctctggccatagacgacatcatgtttgagaatgctatttacctccctttccccttacgctatacaaacgtcttatgagatgttcaatgcgtggtagtataaacgtacggtgtatcaaaggacgagcgtattctacacttgatatctctacataagattcccgagccgtaaccgcgggagcgagcgcaaccgacctctccagttatcagtaccgccctctatagacgccgagatacctttcacgacacccaacgcgggtatccgcgtctcccngcgaatactagagctgagtgtcctagagacgaaggccgcggaccgaagtcacgcaataatctactcagagctacccctcgtgncgatcagccctctacagagagtctcactcggaacgagctacaatgtgatatgtgtagacgcggcgcaaatacaccaggagattgtgtacgtggctacctaacat

SEQ ID NO: 15635 - DNA, 570 bp, Glycine max
  Coding DNA Sequence Number=SeqID_5856
gcttaaacttgaccagatgagactggagaccttactgttggagagagaagattcaactgacttccctgaaagagcaatttggattaaaattgaaggccttaaaaaattacttaaatttgccttcacaatctttagaacttccccaatatgctggctggtccaaaatcaaggggtgcccgagaaaacaaggtgaaaaaaagcttataaaaatggaaacatttggtttaaagaaaaattggaagagcgcagcccgggggttgcccccctggcccagcttagacaggggttatttaaacactcgaccccccacaaaatccaactttacgaaaaaaacgcgtttttctcccgcggtaaattgaccctctcttttgctaactcaaaatgcccccccaaaactacaaattatggttttccgaaacagaaagtccccccccgcccaaaagctctttatataaacaatagccgccccctttagagagaggtattctccaccaagtgcgtaaactctccccctctccccgaggggcggcctccccctcccttctttttgttacagccttcaccaaacga

SEQ ID NO: 15636 - DNA, 309 bp, Glycine max
  Coding DNA Sequence Number=SeqID_5857
atggcaaatgggtagtgacatatgtagagtggtcagaagaggattacctattctatgctaatggttgcggttatattttgtcattagatattgtacgctatattgtatctgaattcgatatgcgtaaattaaggttgtttaagatggaagatgtgagtatgggaatgtgggtggagtaatttaatagcttaaaattagtatattacttgtatagcttcaagttctgttagtttggttgtatagaagattattatattgtttattattaattgttcaggtagatgatgtgttcgtgggataaactgtaaa

SEQ ID NO: 15637 - DNA, 428 bp, Glycine max
  misc_feature (380)..(380): n is a, c, g, or t
  Coding DNA Sequence Number=SeqID_5858
atttcagccggaaggcggcacctctggggatatgggagctacgaggacgaaattgaaggtttcagtgacgaggagccaccacgaggcatgacaccatcagttggtagttgcaggacttctagcaattcaaaattctctcttctgaaccgcagtgtactgatgtctcaatcaacaagcaaagcaaagacaacaaaatctacaccaatgtcaaattctgttgcttcaaaacctctagaagaaagccgcacgaagaagctacttcctaagataacaataagcccactgaggaaaatttattttgttgattcggacactgattcagatgataacaggaaacaaagtaaaccaaagaagcccatgagtcctatcaagaagagacnggaatccatgcacaagtatatgcagaagaagcctatattgcagcaaaa

SEQ ID NO: 15638 - DNA, 467 bp, Glycine max
  misc_feature (76)..(76): n is a, c, g, or t
  misc_feature (267)..(267): n is a, c, g, or t
  misc_feature (375)..(375): n is a, c, g, or t
  Coding DNA Sequence Number=SeqID_5859
gaatttttattcttctctggagagtctaaaccatatatatatagctaacacttatcaaactcttatataataccgnagtaatagtaatagagtacaacacagagtttctaaaagtaatataacggactgtagataattagtagtaaaagtaaaatagtatatatctgcttaagttcaattacaatatatatattttcaataataagtacttacaagcaacaaagccttttatttttttgccaatatttgtttgtgtaaaatccttanaagccaatcttgtcagtataacatctcaatattttcttgtgaattctgtatctttaattagtaaataatagtttaatgtatctgtatataacgaagacaaagtactgnctataaacacaacggtcacttctaatcaccttctcggtaattattatagaaggaccttttcattgaaaccagcttcctttactgataagggt

SEQ ID NO: 15639 - DNA, 334 bp, Glycine max
  Coding DNA Sequence Number=SeqID_5860
aagaaatgctggtcggcaggtgatagagcgtgactactcgcgcatgaccctggacttccacacgaacaagaagcttttggaggaagtggcgataatgccgtcgaagaggctgtagagcaagatcgcgggagtcttgtctcagctgagtaaacgcatgcagaagggccttgtaggcgggatttacctcgagctcgagtaggaggatcgctagcgccgcatggacttggttcccgacgtctccgccgtcaacgccgaccacgtggaggtcgacagagaaaccctcgacatgcgtcactcactctgtatcaactacatgctcgggatcagccaggtt

SEQ ID NO: 15640 - DNA, 188 bp, Glycine max
  Coding DNA Sequence Number=SeqID_5861
aagaaggtggtggattggactacatccctctagaagggggtgccggtggagaaatattccacatggctatatcttacttccaaaaaaatggatccatctcgaaaaggaatacccttacccctggtgaccaaggtaaattggacttcataaaaaaaaatgtttttgtacctattgtgggccccggagag

SEQ ID NO: 15641 - DNA, 487 bp, Glycine max
  misc_feature (119)..(119): n is a, c, g, or t
  misc_feature (154)..(154): n is a, c, g, or t
  misc_feature (170)..(170): n is a, c, g, or t
  misc_feature (174)..(174): n is a, c, g, or t
  misc_feature (195)..(195): n is a, c, g, or t
  misc_feature (203)..(203): n is a, c, g, or t
  misc_feature (213)..(213): n is a, c, g, or t
  misc_feature (215)..(215): n is a, c, g, or t
  misc_feature (231)..(231): n is a, c, g, or t
  misc_feature (238)..(238): n is a, c, g, or t
  misc_feature (240)..(240): n is a, c, g, or t
  misc_feature (287)..(287): n is a, c, g, or t
  misc_feature (300)..(300): n is a, c, g, or t
  misc_feature (305)..(305): n is a, c, g, or t
  misc_feature (314)..(314): n is a, c, g, or t
  misc_feature (320)..(320): n is a, c, g, or t
  misc_feature (326)..(326): n is a, c, g, or t
  misc_feature (328)..(328): n is a, c, g, or t
  misc_feature (345)..(345): n is a, c, g, or t
  Coding DNA Sequence Number=SeqID_5862
gatcactactcacatcatcgagacgtcactatcgatctactaccatcactatcgcaccgatatctgatatgctaccagatgttctccagtcgactgctacatagcacatctcaagtcantcaacctactacactacatacgatcacatcatcancataaagcgcacatcnatcntgagcagcgtatcatgtgcantcatcatncatgatcacncncaactaactcccttcngcagcancnacatcaacatgtacgactgatcgtactcgctgctacgacgagctgcnacctagcaccatnatagnctgctatangtaccntgatanancattcctaatttaccgntgatattccccctccgtgcgacactaccacctcgtgctgtcgacatgtcatcctacgtcagcgcccgtcgtcactagtacagcaaccatatcttcacagccatcccatagataccactccatcattaatcgtgaatcacctg

SEQ ID NO: 15642 - DNA, 155 bp, Glycine max
  misc_feature (27)..(27): n is a, c, g, or t
  misc_feature (80)..(80): n is a, c, g, or t
  misc_feature (85)..(85): n is a, c, g, or t
  misc_feature (89)..(90): n is a, c, g, or t
  misc_feature (119)..(119): n is a, c, g, or t
  Coding DNA Sequence Number=SeqID_5863
tgcactggagtactgctcttgtgtggnacacggatggaactctgctgatatgccgtccgtattcaagatgatcaatggantatcnatanngtctaccctcctggttcaaagccgtctancctagttcgcacctgaccacgtgtttatctccaatg

SEQ ID NO: 15643 - DNA, 440 bp, Glycine max
  misc_feature (125)..(125): n is a, c, g, or t
  misc_feature (141)..(141): n is a, c, g, or t
  misc_feature (176)..(176): n is a, c, g, or t
  misc_feature (264)..(264): n is a, c, g, or t
  misc_feature (273)..(273): n is a, c, g, or t
  misc_feature (299)..(300): n is a, c, g, or t
  misc_feature (302)..(302): n is a, c, g, or t
  misc_feature (357)..(357): n is a, c, g, or t
  misc_feature (368)..(368): n is a, c, g, or t
  misc_feature (370)..(371): n is a, c, g, or t
  misc_feature (393)..(393): n is a, c, g, or t
  misc_feature (413)..(413): n is a, c, g, or t
  Coding DNA Sequence Number=SeqID_5864
atggccgatatatattcttcttgagattcgctgcacatcactgtatattctcattattcttatcatcgatcttatcttacacaattaccttttaattcgtattctgcactatttattgtatcctnttatacacgaagcccncgaacatagagacacacatcacaacataaaaaccntagcacgagtaggtgtgctcgtctgagacagaacgatttattacaatgtctattcatatcatacacgagggcacgccacgcgaacganaacgtggcntcaccggccccgcccatgcaagccgnntnatctcgacctcctatcacagagacatacagcgcaggaaccagccagcgttcactngtgtattatantnnattaaggattgtaatatatgtnttactgaatgtacacatgtngtgcattgaggtaaacacaactggatt

SEQ ID NO: 15644 - DNA, 323 bp, Glycine max
  Coding DNA Sequence Number=SeqID_5865
taaattctgtccaaacatgcacttgttacaactttagaacctccttagtactaatacaatgctcaggaaactaggaaggataagtctgactcctcattgatatgaagatgatcctctcatctataaactataccaactgatgtcatgcctatagagctggtgctcaagggtataatgaaagctgtattaattcaaaattacagtactgccacacattattacattgcacggtaatgattacttcctggataacatgttaatgatagaagtttgtcaaaagttctaataatgttgaagaatcaagtaccctttatgcatagtag

SEQ ID NO: 15645 - DNA, 178 bp, Glycine max
  Coding DNA Sequence Number=SeqID_5866
tcttagtgatgtgtagcacaccatgtcacatgaacagggaggtggcctctctgtcagaccattcatatggattggtgaacctgatactctactcatgcagtgtagaagacgattgtagttgttcgcttgatctgaagtcatgagcacaccgcttccgcaatgccaactgagagagggt

SEQ ID NO: 15646 - DNA, 459 bp, Glycine max
  misc_feature (155)..(155): n is a, c, g, or t
  misc_feature (162)..(162): n is a, c, g, or t
  misc_feature (184)..(184): n is a, c, g, or t
  misc_feature (205)..(205): n is a, c, g, or t
  misc_feature (255)..(255): n is a, c, g, or t
  misc_feature (258)..(258): n is a, c, g, or t
  misc_feature (290)..(290): n is a, c, g, or t
  misc_feature (313)..(313): n is a, c, g, or t
  misc_feature (315)..(315): n is a, c, g, or t
  misc_feature (386)..(386): n is a, c, g, or t
  misc_feature (392)..(392): n is a, c, g, or t
  Coding DNA Sequence Number=SeqID_5867
gaggataagagcaatacgggtacgtgatagagttagtcgatgtatgagagctgggagtaaggagctcgaacgcaaattggagtagctatgtgcgatgaatagtgatggagtcattacacctaactgtggttgtggagctgcgcgagcatcacttntcatctncatagagacgcgccatcgcgcncagcgcctcactccgtgttgngtgacagagattgcgtactatgacagtgtgatgtgagtggacggagaaantgngtagtgatcgaggtgcagtgagagctagatantagtatgtgctggctgtgatatntntgtacggtgagtgtattgtctgtggtagtatttgcctatagatataattgcgaagaagagagaagagccgnccgacnagtatagtacgatgactgacgctacctcggctccctgttcgctgtcgtatgcccagcactgtacacc

SEQ ID NO: 15647 - DNA, 594 bp, Glycine max
  misc_feature (215)..(215): n is a, c, g, or t
  misc_feature (266)..(266): n is a, c, g, or t
  misc_feature (298)..(298): n is a, c, g, or t
  misc_feature (361)..(361): n is a, c, g, or t
  misc_feature (364)..(364): n is a, c, g, or t
  misc_feature (374)..(374): n is a, c, g, or t
  misc_feature (415)..(415): n is a, c, g, or t
  misc_feature (448)..(448): n is a, c, g, or t
  misc_feature (459)..(459): n is a, c, g, or t
  misc_feature (473)..(473): n is a, c, g, or t
  misc_feature (522)..(522): n is a, c, g, or t
  misc_feature (530)..(530): n is a, c, g, or t
  misc_feature (549)..(549): n is a, c, g, or t
  Coding DNA Sequence Number=SeqID_5868
atgtctgacattctagcgatagcgatatcgaggtgagtggttagagtgacgatgatcgctgcaagtgagatgatataatacgatggtatgagtagacgcggcataatgcaggtcacatgtgtcagcatatacagatacgaatctactacatcccatctgcgtatacgtgatatctaatgttctatcgtatatatgtactgctggatgaatacatnacatcaaacagagataacaggactatgcaagatggcgaagtcactacatcnatacttactacacatctattatggtcaatacnctgcgtgccatctatatgtgtcctcgtatgacatcagctatattacacattctgtgagacatncangctagcaccnctcgtcctcaatgaggacatactagcagatcatatgctgantggtgatagaagtagtgggtcgactcagagagngataaagtagntgagactcactccngaatgcagtggcgtgatgctgatagctgtacatcatggatatgacgagnataatcangacgagtgatgaacgaganaatacgacgtcgatctattcaggtcatgacgcactcgcagattag

SEQ ID NO: 15648 - DNA, 502 bp, Glycine max
  Coding DNA Sequence Number=SeqID_5869
agaagttcatggattgtctcctgatgaatatcgacttgtcgcctccggaagagtattagaagaccaaatggccctgaagaatttgaatctttataagaattgtgttgtctacgtgattccaagacctggacctttccaaagtctattctctcatcctatatctcagtttggttatgctgttcgtaatgaatcagtgaagcaaatagctgaggaaggagttgataatcatgccttcacaagtgtaatgaaaacactgtcaaaaactgcttctcgtttgaaacttgaatcggatgtcccactcgaacccttcgatggtacatttgccaccaatgggattcagatttcggcagatcaagtaaagaaacttcggtcctcaaaagaacaacaagtaaaacttgtgtcagcgtacaagttacatgagataattgaaaaaatcaaatcaaaacagaatagtgaagaaattattgaaattctcaaatctgacttgtctttggctgaatct

SEQ ID NO: 15649 - DNA, 570 bp, Glycine max
  misc_feature (28)..(28): n is a, c, g, or t
  misc_feature (83)..(83): n is a, c, g, or t
  misc_feature (133)..(133): n is a, c, g, or t
  misc_feature (163)..(163): n is a, c, g, or t
  misc_feature (198)..(198): n is a, c, g, or t
  misc_feature (214)..(214): n is a, c, g, or t
  misc_feature (228)..(228): n is a, c, g, or t
  misc_feature (246)..(246): n is a, c, g, or t
  misc_feature (248)..(248): n is a, c, g, or t
  misc_feature (410)..(410): n is a, c, g, or t
  misc_feature (430)..(430): n is a, c, g, or t
  misc_feature (509)..(509): n is a, c, g, or t
  misc_feature (512)..(512): n is a, c, g, or t
  Coding DNA Sequence Number=SeqID_5870
attattatcttcatcactggagctatgntagtatgagagatttagtgacgtgagggatgtagcgacgatgcgattattcgtgnaatagatgcgcgacctgcacgccatatagactaaataatgtagaacttanggatgagtaattctgtcgattaatagaggntctcataccacgaaatacagcgagtgctgagttgntataacgcaccgcatnattccactcgcatngccattctctatgtgtantntgatgtacttacgtaacacgctgctataatactggagtatgtatgaaggcgggtgttagtctatactagtgctgatactactatgatataactcctgactaactcgtctatgctataatgtgtggtggcggtctcgccactctctatgatagcagcgagcangctgagactggatgcggttnatgtagcgatgctcgagcgcacatatgactgagcacagcagtagactcgactatatgtggtgtcgtcgttgcaatggtntcnagtatgacatcaaactatatactatgtacgttcactcctctcgatcacgcgagtaaca

SEQ ID NO: 15650 - DNA, 565 bp, Glycine max
  misc_feature (342)..(342): n is a, c, g, or t
  misc_feature (498)..(498): n is a, c, g, or t
  misc_feature (513)..(513): n is a, c, g, or t
  Coding DNA Sequence Number=SeqID_5871
tcttcaccactcatcttcgatatatatcatccatccgacatctggtccttttattatattaaacgcgtgccacatatatacacctcgcaactgtatatgcactatatacacctatttaacatcagcgtatttaatgacaccaggggacacattggggagcgcctagtgtatacacacacaaccttctccaccgacgtatacacccatctttcgtgcctcgcacacgtgtactatagatatattccatctatcacttccttcacaccgtcgatgtcgctatgatcagataactctcaaacacacgcgactcccactttactcttatatctcgctgtctttgtnaagtagattcgtgtataacgccgcacatctcccagcattaatacaatagttgtttatatacactactctctaacttaccctatccagcgtcccacacttcgcatttaacttatcatatcttgcgacaccacagacatatttacctttcaacgtccnacattttaacgtcgnctattctaactctcctctcgatactacatctatactatactcgtgcggtact

SEQ ID NO: 15651 - DNA, 569 bp, Glycine max
  Coding DNA Sequence Number=SeqID_5872
tgcttcgtcatctatagccacctggccgtggcctctccgagctctacccgcgtcgacgcctcaggcctccatcgatccacccgtccatccatgcccggagcagcgccgccctcgccggagcaagcaccaaggttggctccgccgaccggtccgcctcagcgcctcctcccgctcgcgcctcctcctgcctcgtcctcgttcccgcgccgctggtcgccggaaaccagcaggagaagccccgcctccgctcaaggacccgtgccattcactgctgcctgctccgttttccctgcgcacctcccggtcccgtgctgcacagccaagttgtcatcggtggcctcgtcaatcaccacccaggctgctatcttgaacagctcctccacggcttctagtctgtacgtggagttccatcagttgctagagcaccacggatccacaagtagctctacgcacggatacaccaagacctggaccggctagtaccacgacgtccgtcgatcgtcaagtaccatttggatgcaccaagttccacgacgatgtataagtttcttctgaacatgtacgactac

SEQ ID NO: 15652 - DNA, 274 bp, Glycine max
  Coding DNA Sequence Number=SeqID_5873
gcgtgtctggttctattcgactacatgcccacccgctgagtacattgtaaagtacacagatacaacccatgttaattctgatagtactttggctgctgggttgcttcggatgcacttccatgattgctatgtgcaatgccgtgacacttctgttctcattgtcagttatggcactgacagaacatcgttgacgaccctagctttacgatgatgagcggttactgatgatgcaacgaaccgacttctggctagatgccacgcagtcctggcatgc

SEQ ID NO: 15653 - DNA, 309 bp, Glycine max
  misc_feature (26)..(26): n is a, c, g, or t
  misc_feature (57)..(57): n is a, c, g, or t
  misc_feature (85)..(86): n is a, c, g, or t
  misc_feature (110)..(111): n is a, c, g, or t
  misc_feature (155)..(155): n is a, c, g, or t
  misc_feature (205)..(205): n is a, c, g, or t
  Coding DNA Sequence Number=SeqID_5874
cttgggtgagccgtggcccttggcancgctcaaaaggacactttcttggaagtgtanagcgactatttgcgcacatctatgcaannaaacaccgactcctctattgtgannaaccaccatctagagcattatgcaaaatgccacgtagcctcagntttttctggcttattgtgtttaagtacgccattcatctatttaataaagntggcttggatttatgtaggtttaaaccgtctttttaatctcttaagggaaagactttttttttaggaagcctcaaacaggaagattttagtttggaatgcgtta

SEQ ID NO: 15654 - DNA, 135 bp, Glycine max
  misc_feature (72)..(72): n is a, c, g, or t
  misc_feature (89)..(89): n is a, c, g, or t
  misc_feature (91)..(91): n is a, c, g, or t
  Coding DNA Sequence Number=SeqID_5875
cactcatcatggcaggagctttgagagtccctaatggttatgccctaagctgaatatctttttctctcatcnctggctcaaaaaggggnancttgaatcctaatggatctttaacccagcaaacaaacttccata

SEQ ID NO: 15655 - DNA, 478 bp, Glycine max
  Coding DNA Sequence Number=SeqID_5876
caatcttagttgctttggtcggaaaaaaacaaaagtttcgatcaaacaattcagatggtttcgcagatgatctcgtgtttatctaaatcttcgtctcttttctgcatctccggttcccggagtttaatcccgccgaagacttacaaccgcggcggtttgtgccggttttctccgggatttgcaagccgccggttatctacggtttaccgtagaaaatggagatcagcgtgcatttccaactctgggaaagaaactgaaggagagggaaagttacaaggaggtgggtcagagtggcggatacttgagagatgggaagtgccatgggaatggcagacagtttcgttaacttcgcttgcttgtggtttaaggcagttttgttttgacagggttaactgagatggtagccttaccatatctagggatcgacgttcagaagctgagcttggacgacaaggcggagatcttattcctggatcaa

SEQ ID NO: 15656 - DNA, 365 bp, Glycine max
  misc_feature (26)..(77): n is a, c, g, or t
  misc_feature (155)..(159): n is a, c, g, or t
  Coding DNA Sequence Number=SeqID_5877
aatgttatatctcttagacttttgcnnnnnnnnnnnnnnnnnnnnnnnnnnnnnnnnnnnnnnnnnnnnnnnnnnnnctatgccttgtcattgcttttattaacccatgtgtttccctaatcaatgcagtttaaactggcaacaccagctttgcnnnnnccctaggccaaatccggatataaagactttattcactgaccacacatgtacacctcctaatggtcctctagcacctacacctgtcaatcttcctgttgctgcggttgcaaagcctgctgcttatacttcaattggttctcatggtgtatgataccttgcaccctttccgcctgccgcggcaactgctaacactaatgctttggctg

SEQ ID NO: 15657 - DNA, 380 bp, Glycine max
  misc_feature (168)..(168): n is a, c, g, or t
  misc_feature (184)..(184): n is a, c, g, or t
  misc_feature (238)..(238): n is a, c, g, or t
  Coding DNA Sequence Number=SeqID_5878
ttgttatgtgtatgacgtgtaccgagttactgatctatataattatgcatattcacttaagtaatgatgtgttgttggatgaatgtatgttgtgacaaaattacttctattttcataagaaaacttaaaggagttcattttataaaaattaaaattatcgcatattanagtgttgatatcgtancggcgaggcgggtcgttacatttagtgatatcagagcccggttgaacctttcanccagtgagttgtgagtctactatgtttttctgtgcattctctggttgttttgttgaatgctttgtgttggttgtttgctgttgtttgctgatgtttgatgctcgttctttgctattagcacgtattcactagttgtgtttta

SEQ ID NO: 15658 - DNA, 413 bp, Glycine max
  Coding DNA Sequence Number=SeqID_5879
gagacatacaacacgtctgaacgaaataacgattacgcggggacgcgagggagggagagaaacgaagaaagaaatataagagggagaagagtaccccagccgccgaccacgctaccaaatatataaataaagcgggacgaacgccgcgtataatgggtggcacatcacccaggcgcgctcccggcacagtcgcgtagcaaaaaaacgatagaggggagaggggggcgcggcggggagagataaagcagagagagaggaaaggcgcggacgctagcgaaaatcacaaaagaaagagggcgggcagaggcagcgacgtcaacgacgcgtactgcaaacggcgagctacgcactaaccacctaaaaagcagagagacgtgtacatcacgcgacgggcgcggctacataatatgagt

SEQ ID NO: 15659 - DNA, 315 bp, Glycine max
  Coding DNA Sequence Number=SeqID_5880
tcttattttgggctgcctttttgggttccaggtccataattttcaaatttgaagaaatgggtcagagttgtatggagaatttttcaagccttgtgcctacttggctgcaagagctgccaaaggaattccactggtcagtagcctacgctcatttatttccatgtcatttatgcaaactatttgtcatgttattcacacttattcttggattgtttagtaacttaaggtaattttgagatctaaagggcacttcattgacacactgcatctgtagccagaaaatcaacatcgtctaatggactttgtcgattacaa

SEQ ID NO: 15660 - DNA, 378 bp, Glycine max
  Coding DNA Sequence Number=SeqID_5881
gcttgacagctagaacgtctgatccgagggaagacatgttcccacaaaccctaatattgtctagcactcataatcctttccatggagatctcgtcttaagcacaacagcaccagatgatatccacgatgttctcctagacggttcccaaagggtcttcttccacaacgcggctcctacacccttcccccgacgatggcttttaccgtccactcgatgccccctgtacgtccactggacgaccaattatctactaccacagccaatagtggcactctcacctacgtccgctcgcacgtgtcgggattcagccagaactcttcttgctcctgtccggattaagtcacagattcggctgtaagtcttgtggacttgcccaa

SEQ ID NO: 15661 - DNA, 467 bp, Glycine max
  Coding DNA Sequence Number=SeqID_5882
gaagctggtgacatcaatatccggagttgcagcgaacgcttatcaggccatattgccttatgtcagagagggatatcgttggcatactacattatgatgtgattagatggagcttaatacaatatgagaagatgtttcccagacgaatatccaatggctgcttcaaaggttatggtttctagacataaatatatcatccgaacattgataagcttggctggatatgtcttgacattctgaaagataacaggagtcctacccttgggattctcactgtactttagagtattcaagctattctaagtgcacgtaacccagatgatccactttctgagaacattgtctagcattgcaaatctaatgacgtcaatgctgctgaaacaggcaaggaatggacccgaatatatgctactggcgctcgatgctatgggggaaacttatgtcttcggacatctataacggacgtg

SEQ ID NO: 15662 - DNA, 532 bp, Glycine max
  Coding DNA Sequence Number=SeqID_5883
aatagtctcaatgatacctcgatgaactgtggagccggtcatgaccgatatcgacaaggaagccctgtcgacagacacgttggttcctgtcgcagtacacgatccaattgttctaccggctggtcgccgtgttactgatctgcgccgttctggcggtgctcaacgattccttcctcagcctcggcaatatcctcaacgtgatgcgccaggcgaacctcacgttgttcataaaaaccggcctgacgctggtggtgctcaccgccggcctcgatctgtcggtcggcgccaatgtcgcgctgtcggcgtgcgtcgccggcaccgtgatccacaccacgggatcggcaacgcttggaatcctgaccgggcttgcctgtggcggcatcgttggcctcctgaacggcatcatggtgacggcgctgcgcatcccctcgttcattaccacctacggcatgctctgggtgctgaacgggctcccttactggtacatgggggaaatgcagcccgggggatccttattgctagggcggccgcc

SEQ ID NO: 15663 - DNA, 380 bp, Glycine max
  Coding DNA Sequence Number=SeqID_5884
tctctcttatctaatcttcgccatgtctagactccctcctcctcctctactctcagtcaacctccctctcatagagaaaacaaccgactccgagttaaccccgactcgactcagtttccccaacgagttcccctacgagttcgactctccagcgttctcccctggcttcacctccccagggaactccaccgagacggaagacgagagcagcgacgacgaagaagacttcctcgccgggctgactcgccgactcgctccctccactcaccgcctccctcctccctccttcaagtccgaggagaaacgtcaggtggcagcaacttcgccacttctcccaccgtcgcatgcgcatacgacgtcgtttcggagagacaatgcgt

SEQ ID NO: 15664 - DNA, 503 bp, Glycine max
  Coding DNA Sequence Number=SeqID_5885
aagtgtcccctgcttggagctaaacgggcatcgataagcgatttaagtgtgtttccggttgtcaagcttctccctcaggtttacgtaattttgagcatccgcacttttcagttggcggggtggtttcatcatatgcgtcacacatgtagccgctgaaagtatttacatatagttgcgcgatagctcagtcagtatataagcagtcaagtcgcaacctttgccttagagtaaagatctgcctcacgttaatccaggatttacacatgaagtagtttacctttgacgctgatcagattttttcatcaggggagtcagcataagaaattgaaatcagttcagacctaagcttgtcatcttgatcacggttttgcatcgcaacaccatctgatttcttgctctccaagccagactgtgattccagagttttatcatgtaaagagttagagatagcgataatcgactcacgtgtctactcctgggactccttgcttggtgacttgtta

SEQ ID NO: 15665 - DNA, 180 bp, Glycine max
  Coding DNA Sequence Number=SeqID_5886
aagtgccacgtcactcggtcctaatgcctatctctacgtacctaatggatgtcaaaataaaaatggatgtcaagttcatgcagtatttcatggatgtgaacaaactctctctgatattaatatgacttatattacaaatactggatataagggctgggccgaggctaacaacatcgcggt

SEQ ID NO: 15666 - DNA, 491 bp, Glycine max
  Coding DNA Sequence Number=SeqID_5887
ccagcacccggatcaaggagcacgagctaaggggggaggacgaagaagatgggcaggccgagctcacggacctaaagccggagggggccctcctccctcccccccggctcaccggccgccggcgccaccagcaatccgagatcaaggaggtgggtgcctcactcgcgagggtggtcgctgtgatctcgcagacgcagaaagcggcgggtgagggaggaggacaacaacaagcatctcccgccccacgtgcgccccccgaagaaagacgccctccgccggcggctgaccaagcaccaaccatctttgctgacggagagggaggaggaagaagagaagtaagtactcctgcggcaggatgctatcaagtcctaggttaggaggacagggtataatttgccgcggccggctttgacgtagcatgaatttgattttttttgtggacgcggctgctatcctagtccaattcatatgttttcgttatcctgcatgaa

SEQ ID NO: 15667 - DNA, 519 bp, Glycine max
  misc_feature (171)..(171): n is a, c, g, or t
  misc_feature (368)..(368): n is a, c, g, or t
  misc_feature (383)..(383): n is a, c, g, or t
  misc_feature (471)..(471): n is a, c, g, or t
  Coding DNA Sequence Number=SeqID_5888
atatacgcctctcagcctagtgttgtcggattctacgatctccactagccgcgcaccatggtaatatagttgtgtcatccgcgctaactggcgatgtattggacgaccgctgcccgcacctgctgatgactggatgctcgtagaggaggcggccgcaatagcaggctgagnttcgtatataatacgatttcgcgtatcatgccgtcgcagacgcgactgccctcacgtcgcacctcacgtctcacgatgtgcagtaatgtattgtgatcgagcatgtgtgagcgtatgtccgtgcggcaatctacacattgcgctcatgctgcactcgtagcctacacgcttctgtgatatgatatattgacgtggantgcgtgcgcagtatngcatgcatgtgtcagcgacagtactgactcgtatacacctcagaggactgacgtgtttactcggatgtatggcaccctgtgatagagntgaatacacattgtagtcttgacgtacagctatcaagagctctcccgt

SEQ ID NO: 15668 - DNA, 574 bp, Glycine max
  misc_feature (75)..(75): n is a, c, g, or t
  misc_feature (269)..(269): n is a, c, g, or t
  misc_feature (362)..(362): n is a, c, g, or t
  Coding DNA Sequence Number=SeqID_5889
tcttcatcattgtaacgactgtcgtcgttttattcgtatgacgatcgcatgtgtctattatgtctcgagtctcgnattctttatcttcgctcgtcctgctactctcaccttatcatccacgctctccgcgattacactctcgctcgcgtgctactcacaagactgcgatggatcatacgagctatacactactagcgcgacgatcgtacacacacactcaagactaatcttcgatacatatctctccgcactatacagctctctgcatncttcatgagtcgtgatgtagtatattgtatatctatatctgtatcgtgcacgtccgcgtgctgccagctcggaatatcgctgtttgacacatntacatcactctcactacacgccacacatatacatatataatataacacatatatcacatactgaatgagcgagctcactgtgactcatatactctattatgtatatatctgtctacatctccctctgcatatccatctcctttctcctctctctctactccctacgctgtgtcctctttgcgctctctgcgtctgctctaatattccacgag

SEQ ID NO: 15669 - DNA, 498 bp, Glycine max
  Coding DNA Sequence Number=SeqID_5890
agcttccataaggtgcattgtcagatgcattgacaatatggagatcagtttgaacgattacgaagtgattgtggaggataaggtggatcgacccgaggttagctcctctgaagatttgagccacgaccaactgaggtcaaatgccacgctactcttgaagtatttcaggaaccgcactctcgagtacttttttgccgctttcttccctcctgatattacacatgttgacgatgctatggcccagtttggtctcatcaggtctcatctcgaaaattgtgagtctctcatttacaaggttatgatggaagcttatgactgcatagcaagttctgaagatgaagactctgggtatatatttttctagcttacctcatgttggatggatgtgcttacctaagtgatggatccgatcgattagcttattttattttaactttgatgtggatttgtgttagtttgacactcctaatgatgtgccacgtttttatgttactatgt

SEQ ID NO: 15670 - DNA, 436 bp, Glycine max
  misc_feature (144)..(144): n is a, c, g, or t
  misc_feature (329)..(329): n is a, c, g, or t
  Coding DNA Sequence Number=SeqID_5891
atatactacctcacagttctcgttatcttatttaccactataacacatattcctctaatagtacgtctctctctttttagtgtatatatgtggtgttttgtcctcgtcgtcagtagtagagactataatacattgaatacgaancacataacacacaggatagatagtcccgtgttgtctatcgcgtcgtgctgggggtgtgagcgcggtggggggctgcgctgcaatcagcctgtgcgtggtgggtgtggatgtgtgtctgatgcagcggtgcgtagatcttcgcctcccacccacatcactctctctcactgataatatcaccatantacttaaaagacatgcagagtggagagtaaagggagaggtggacgtagatgttcactcgtgtgtgtcagttgttaaaccatcgccgtcagtgtcttcgatgttggga

SEQ ID NO: 15671 - DNA, 485 bp, Glycine max
  misc_feature (91)..(91): n is a, c, g, or t
  misc_feature (108)..(108): n is a, c, g, or t
  misc_feature (183)..(183): n is a, c, g, or t
  misc_feature (198)..(198): n is a, c, g, or t
  misc_feature (207)..(207): n is a, c, g, or t
  misc_feature (209)..(209): n is a, c, g, or t
  misc_feature (213)..(213): n is a, c, g, or t
  misc_feature (217)..(217): n is a, c, g, or t
  misc_feature (262)..(262): n is a, c, g, or t
  misc_feature (279)..(279): n is a, c, g, or t
  misc_feature (302)..(302): n is a, c, g, or t
  misc_feature (310)..(310): n is a, c, g, or t
  misc_feature (324)..(325): n is a, c, g, or t
  misc_feature (339)..(339): n is a, c, g, or t
  misc_feature (350)..(350): n is a, c, g, or t
  misc_feature (353)..(353): n is a, c, g, or t
  misc_feature (359)..(361): n is a, c, g, or t
  misc_feature (374)..(374): n is a, c, g, or t
  misc_feature (385)..(385): n is a, c, g, or t
  misc_feature (397)..(397): n is a, c, g, or t
  misc_feature (402)..(402): n is a, c, g, or t
  misc_feature (419)..(419): n is a, c, g, or t
  misc_feature (437)..(437): n is a, c, g, or t
  misc_feature (452)..(452): n is a, c, g, or t
  Coding DNA Sequence Number=SeqID_5892
tgtactccgctctgtcacgatagcgcgaaacgtgggcggctcagtctgaaatcatgtatctcatgaacatcacgccgcgcgtatgatgcgncctacctcgcgacacanacaggccgctagtctcatcgatctgtacacatatatgttggtgcttgtatgagcgactatgcgcagcagcagcgntgagtgctgagtganacgacaatntntctntgcncaacagaggacggatctccgaaatctcatgtatcgcagcaacgangcctcgtgaaagcgagnactgagtagatgagcggtgaganctatgatnagctcgtgccgtgnngcataggttctagnatcgtgtgatncgngcagcnnncgtagataacgcntatcgatgttnctgtacgcatgncgctntctcatgatcatcatanctgtcttacgtaacaaangtagtctatggtctnactagtgtaagtgatcatacacgagacagagca

SEQ ID NO: 15672 - DNA, 579 bp, Glycine max
  misc_feature (475)..(475): n is a, c, g, or t
  Coding DNA Sequence Number=SeqID_5893
gtcgccaagcggattgtaatatttgacacacaccaggaggtagggtgagagataccgcgccacaccgcttttgcccccacgggctgtgggttttcacacgcagtttattaaatgaccaggacgccacgagtgttatgtggtctcgtaccccgcccgggatatggattacgccgcccgacacacggcggagggtgttggtcggcgcggcactaatttagggggggtgcgggaacacaagaattaggacatgagggaaggggggtggggggtgggatgccccattccgcccgcgtgtgtggtgtttgttccgcgagatattatgttgaacctgtgttgcaacgaatatatcacacatattatgaatatgttatggtggagtgaggaataagctacccaaacacaccccacccaatttgacccgcggcggtattttcgccccagcgtagcgaagacagattaaataaccactgtattntcttctctccctttttattgactctctcccccacaccgtttcaataagttctctcctcccccgcgttttttttaccaacagacgaacaccatttcgtcggccgc

SEQ ID NO: 15673 - DNA, 570 bp, Glycine max
  misc_feature (26)..(26): n is a, c, g, or t
  misc_feature (86)..(86): n is a, c, g, or t
  misc_feature (456)..(456): n is a, c, g, or t
  Coding DNA Sequence Number=SeqID_5894
cctcgcgacgcatcgattacataganagaaatgcatatgcggtactctagacagccgtgccctcacgcatcgcttgtcccataccncatcgcgctgctactcagcggcgaatgctggcccccgcgtaccagcgtcggtgcagtcggcacaccaccacgcccgtgatgctgatcacgcacacatgtgagctcactgagagagcgcaaactcacgctcctctcgcgacatcgcacagcaacagcctgagcgcgcgacaagtgatacgagatgaagccgtagtgctatagtgcgctctgtgcatcagcgacctgtctattcggcggcatgacgatcatggcccatggctagacgaacgcttactaactgcctaccagtcgctaaccctcgcctcttcaactagactcgacttctctgacgtacaccgcgctaccagctgaccgcccccggtacatcaantttagcttatctatactgagcacgagagacgcgactaacagccgaatcatgacctcggagaacgctactactccgcgagactgccaaacaagttaccgctatatgcacacatcg

SEQ ID NO: 15674 - DNA, 482 bp, Glycine max
  misc_feature (196)..(196): n is a, c, g, or t
  misc_feature (265)..(265): n is a, c, g, or t
  misc_feature (276)..(276): n is a, c, g, or t
  misc_feature (315)..(315): n is a, c, g, or t
  misc_feature (320)..(320): n is a, c, g, or t
  misc_feature (323)..(323): n is a, c, g, or t
  misc_feature (338)..(339): n is a, c, g, or t
  misc_feature (343)..(343): n is a, c, g, or t
  misc_feature (348)..(348): n is a, c, g, or t
  misc_feature (393)..(394): n is a, c, g, or t
  misc_feature (436)..(436): n is a, c, g, or t
  misc_feature (442)..(442): n is a, c, g, or t
  misc_feature (444)..(444): n is a, c, g, or t
  Coding DNA Sequence Number=SeqID_5895
gctcccgccaagtaaaaactcatcatgtgaggttatagtatctgactattagggcgcaaggatcagttgaactacggttgattgttttagatattgtactgatagccctcataactattatcataagtggaagtgtttatattgtatatcgtggtggagccgcgtgtatatctcctctctcattccttatatattnatctgtattttggtagggtggggtgtctgcgtgtatcgataacgcagattattgagaaagcgatggtgnacgccgctgtngtggagaggtatgatggggaggataggctatacattatntcaanagncgtgttgtgtgttannctgngagtncttccttctatcttgtctattgttttctcttcctctgtctttggnntgagaggagagaggagagagagaggtgcacgctcctatctgntctttncnatggacgcttgatatgttttgtttcatctatgccttat

SEQ ID NO: 15675 - DNA, 327 bp, Glycine max
  Coding DNA Sequence Number=SeqID_5896
ggagatccgcgccatgccgctgaacatcgtcttcgccgacgcccagcatatcggctggcaggtcaccgggcgctacccgaatcgccgcgaaggtcgtggcctgctgccctcccctggctgggacgagcgctacgcctgggacggcttcactgacccgatgctgcacccttacgatcaggacccaccgcaaggctggctgggcaccgccaacgaacgcagcgtgccgcccggttacggcatgcaactgtccagctcctgggactacccggaacgcgccgaacgcatcgccgagctggccggcaatggccgtcacgatggccgcagcat

SEQ ID NO: 15676 - DNA, 564 bp, Glycine max
  misc_feature (60)..(60): n is a, c, g, or t
  misc_feature (291)..(291): n is a, c, g, or t
  misc_feature (304)..(304): n is a, c, g, or t
  misc_feature (405)..(405): n is a, c, g, or t
  misc_feature (433)..(433): n is a, c, g, or t
  misc_feature (451)..(451): n is a, c, g, or t
  misc_feature (516)..(516): n is a, c, g, or t
  Coding DNA Sequence Number=SeqID_5897
acgactactgccgtgccattgagtcgctcgcgtagtgcgtgcgtcgcgtgcgcgtacgcnctgcactactgcatcacgactcatcgagctactcggcattcgttcgttcactatatcacgtgcagacgcgcgctagcacgtcgtaaatatggacagacgcggatagagcagcgcggtacgagtcgagataactgtcctcagcaataataccgtatacgtgtcatatctctatgtatgtatagtacgtagtgagacattcagctctagtagactacactcacagtacgacgntatatacaacganaactcagagtagcgagaaagtgtgtacgttataatgtgactctctatgcgcttatatgtcatagagacaactatagcatcgcgtcgctagcgtagtgtctncacacgaagtaagtatagtaggagctgnagaacgatgagagcatanaaatgctatcgtatgacagcgcgtcacaacactatacataagtaatcacatacagaagtgatcgnaatagacacaagttcagaatagatatatagtctgcgagcagtctcgga

SEQ ID NO: 15677 - DNA, 409 bp, Glycine max
  Coding DNA Sequence Number=SeqID_5898
tccaactagtggtgccatctgctgacccggcgatggttgctcctgcttctgcccggtctggacggggtcgtcctcctgggattcgggcgcgccggcatgcgtcttcctcttacggattctccgtcggtgatggcagacgctgctgtgcgtggtcagttgcctggggttcattcagggcggcgttccgctccgcggctcgccggccgcttcgttccggcgtgctgtctacatcgacggaagacggcagtgcaggcgatctctccgtccactccggtgatccactgaacagcgactacatcgacagacgacagcccttgaagttctacgacggcgaagaaaccatagcggacggtcacgacagccacccgtcattggcaatatcatggccgtcgcacgagaatgtgtccat

SEQ ID NO: 15678 - DNA, 525 bp, Glycine max
  Coding DNA Sequence Number=SeqID_5899
aagtgttcacgggtgtccatcgccgtcatatttgcttcggcgttctggttgcggcgcgtgcattacagacctgcccccccgcgcgcactccccctcttcggtgtgcttcatgcgcgcgggggggtaggtttcacggtccgtcgtcctccttttgcattgtgtatctgggctgatccccgtggccgtggccgcgtggactatccctgccgcggcgctaatcctcgtcgcccgcggcctcgggcgttggtgtattgggcaggcggctctcctagaccatgtgttcttcgtttttaggtcttcctactaacgtctcttccccgcgcggcaactcgcgcccgtccccccgcgccgcctttcactgcggccccagacaccggggcggtctcctaatactcgctgtctggggactgtgttcgctcatggtcctcattgtggcggtgtaaggaggctcacgctcggttctacgttgtggcttgtctagcttcccaatcatcattctcctctctcttccataactgcgatgat

SEQ ID NO: 15679 - DNA, 486 bp, Glycine max
  misc_feature (27)..(27): n is a, c, g, or t
  misc_feature (31)..(31): n is a, c, g, or t
  misc_feature (368)..(368): n is a, c, g, or t
  misc_feature (427)..(427): n is a, c, g, or t
  misc_feature (431)..(431): n is a, c, g, or t
  misc_feature (436)..(436): n is a, c, g, or t
  misc_feature (440)..(442): n is a, c, g, or t
  Coding DNA Sequence Number=SeqID_5900
tgaccacacattccaggccacatttanttanatgtggaggagaaacacagaacacacaattgaataaaccgcaccgacggagccacttgaggtatcatcacaagctctgtgagcgtcaatagtgtataaatagcagtactatttacttagataactaccgtctcccgccgcgcgttaccggacctcaaagcgatgaggcgcgcgtgctaagcgtagtagagaaacagaaacctagtgagcatctagtatatataaccttgttatttatttattataacggggtgggtggtcggatcctataatagtaggtgactttctcctgagggaggtggtgagagtgagagagcggtggggctcaacccaccacnctctcactctctcatgatagtgatgatgttgtgttgtgtatatagtaaacgaaggaagncgtnttatntttnnnactttagatttacagttattagtttatattagatagtggtcccc

SEQ ID NO: 15680 - DNA, 361 bp, Glycine max
  misc_feature (182)..(182): n is a, c, g, or t
  Coding DNA Sequence Number=SeqID_5901
gcttggctaaatacactgtcatataccaagagaatggcctggttcccattgttaaccctaagatccttattaatagacctcataacattcacaagtataccaccgtcaccaaccatatccttacagcatgctacaaggctttaaatgatcaccatgtccttcttgaaggtaccctattaaanccaaacatagtcacccctggatcccaatctactaaagtttcccctcaagtagttgccgagcacactatcaaaacccttcagagaaccatacctactgcaggtgctactatcgtggtcttatctggtgaccagagtaaagaagaggcatgcagcgacctcaacaccattaagccaatcga

SEQ ID NO: 15681 - DNA, 582 bp, Glycine max
  misc_feature (53)..(53): n is a, c, g, or t
  misc_feature (472)..(472): n is a, c, g, or t
  Coding DNA Sequence Number=SeqID_5902
acgagagtcgagcaacagagtagataggtaggttgtacgcaggtggcggaacnaggtcatcgatatcaagcgtctcgtggtacggatgccttatcatagagcgtcgcaggctaagggaagatgcgaatggatgtgtgggatgcgcggaggcgatgaggacgtaagtagggggagagagggatgttgtgtggttgcttagggtggatgtagagaaagattcgagagtatgggcggacagtgagaaggagaacatagtaagagttgttgagagttcagagatagaatatactaataagtagcgggagatggagagaatgaggattatgacgtgtagagacagcaagcgaggcgaacacaaggagagtcggaatatgtgggagcgaagtcgaaaagaatgatgaaactctatacgagagaagcggcgaggagagggaggagagcgcagcgagggataaacatcaaacagatgtgnattagtaagactgttaaggataaagtgatgtgataccgatcatacaagataagcaagcgtatgtgttagatataggggaatttgtgtatttgttttgttgtgacgaggtg

SEQ ID NO: 15682 - DNA, 542 bp, Glycine max
  misc_feature (37)..(37): n is a, c, g, or t
  misc_feature (114)..(114): n is a, c, g, or t
  misc_feature (125)..(125): n is a, c, g, or t
  misc_feature (180)..(180): n is a, c, g, or t
  misc_feature (212)..(212): n is a, c, g, or t
  misc_feature (228)..(228): n is a, c, g, or t
  misc_feature (243)..(243): n is a, c, g, or t
  misc_feature (264)..(264): n is a, c, g, or t
  misc_feature (266)..(266): n is a, c, g, or t
  misc_feature (300)..(301): n is a, c, g, or t
  misc_feature (306)..(306): n is a, c, g, or t
  misc_feature (308)..(308): n is a, c, g, or t
  misc_feature (363)..(363): n is a, c, g, or t
  misc_feature (383)..(383): n is a, c, g, or t
  misc_feature (403)..(403): n is a, c, g, or t
  misc_feature (410)..(410): n is a, c, g, or t
  misc_feature (477)..(477): n is a, c, g, or t
  misc_feature (481)..(481): n is a, c, g, or t
  Coding DNA Sequence Number=SeqID_5903
caaacacgcgtcttcctacgtaatgctacagatatanagcacagcactgcgacgatgcaaccatatggcatcgacgctcgtgtgcaaatcgattcgaatatgatctactacttngctcatctatnctcagtcgtgagcgatcgagacgtgcgatgtagtcgacgatgagagtgagtctgncgcgtgtcgttacatcgtatacagacgattantcgcatacgcactcgntgcatagtctagacntctatgatgctccagtgcgtngncgcgatgtagtgagagcgtacgtgacgaagcgannacagngncgtcctgtagttgagtaacggtagtcgcgtgtggtggtggtgttgggtgtagagntgtgtcctgattgtgtgctncgatgcgaagtatgtgcatngtgacgnagacgcagacagcagatgcagtacagcgatagcgagcgcgacacactacgctgcgtctgcgtcagtngagngcgcgtagcagagagagcgcatgcgctgtagtatgtacctgcgtcgtgatagtgtaatgag

SEQ ID NO: 15683 - DNA, 522 bp, Glycine max
  misc_feature (36)..(36): n is a, c, g, or t
  misc_feature (88)..(88): n is a, c, g, or t
  misc_feature (179)..(179): n is a, c, g, or t
  misc_feature (183)..(183): n is a, c, g, or t
  misc_feature (193)..(193): n is a, c, g, or t
  misc_feature (258)..(258): n is a, c, g, or t
  misc_feature (346)..(346): n is a, c, g, or t
  misc_feature (376)..(376): n is a, c, g, or t
  misc_feature (387)..(387): n is a, c, g, or t
  Coding DNA Sequence Number=SeqID_5904
ggcatgcgtacgttgtgttgttgacgcggcggtatngtgttagcactgctacacacactctgcacacggtacgacgctgcctctccangcgagcagtctgctgttgtctcgcgacagctcacgcatgtgctgatcacgcaggcgtgtgttgtgctgagcacttacgctacgcggagacntcangtgcagagcnctaccctccgctccacagctctgtgtcgcgacatagtgctcgcgccttgtactcgcatgagctantgagactgtaggatgactatctggcacgtgagaacgatagaatcttgcgcgtataggcgtgtggcgatcaacactagtctgacgtttntgggactggtgtgatgtacgtgggcgcgcntgatcatatgnagctgagactgcgtcatgctcttagactacgagcctgatgtcgtgaatgagtgtgtggtgatcaatgatgcatgagcacgatcgtgtcgtcatctagatatgcgtaggtggcgtatgcagatactggcgctcaga

SEQ ID NO: 15684 - DNA, 408 bp, Glycine max
  misc_feature (91)..(91): n is a, c, g, or t
  Coding DNA Sequence Number=SeqID_5905
tcgtctccatcgctggcttatccattcgcccccaccaagatgcatctgcatccatctctcctattctctcgctccatctctcatcttctcnaatctctctgtgggcggagcaaagtgagagccaagccagccgagccgacccctctcctcttccccttcctcgcagcggttcgcgatttgccccttctcgctccatctctctttctcatcccgtgcttccaccgatatgcgcagccaacgggatttagcgctatgagacaactgctcggcgaagttcgttcccatgttgccggcgtgtttaatcgggtgactgcatgcagggccggatgtgaagcctccaaaatcgttggtgccccccgttccacctgagcggatgtgaagccaagtcgctggcaccccgttctagaa

SEQ ID NO: 15685 - DNA, 521 bp, Glycine max
  Coding DNA Sequence Number=SeqID_5906
gaaatcagttagttcttgtcatatattttgtaattaactcatagtcataatattttgtttttgcttttttacatttttctccatacttcaaagatatacataagcagttgtatcattattctttgaaacatcaatttcagtcttaatttatgatacttttatattaataagatggggagcagaaagcgcaaatggacaccaacccgcataaaatatttcagcaatctgtcacaatgacagcaaaaatgtggcctcagaacaaccatacagtgacagaaggcaactgggagtggggatggcgagttcccccccaccactggcccctactggttgccatgttctgtggtggcgccctggtgctgctgctcgtggtaactacaatcctttggcactgctgcgtcgctcctcatcgtaacaaagattacagagttaagatggacggagaaacactcccacagagaggtgtagttcctgtacttccaagtcactcagctgtgtttggttgagcctaagtatccaga

SEQ ID NO: 15686 - DNA, 554 bp, Glycine max
  Coding DNA Sequence Number=SeqID_5907
acaccgaggctgtcgaatacctgaacaagttggcggtcgttaagcttaacggtggtctcggtacctccatgggttgcgttggccccaagtccgtcatcgaggtccgtgacggtatgtccttcttggacttgtcagtgcgccaaatcgagtacctgaaccgcacatacgacgtcaacgtcccattcgtgctgatgaactcgttcaacaccgacaccgacaccgccagcatcatcaagaagtacgagggacataacattgacatcctcaccttcaaccagtcgagatacccccgtatcctcaaggactcgctcctgcctgctcctaaggagaacaagtcagacatcgccaactggtacccccctggccacggtgacgttttcgagtctctctacaacactggcatgatcgacaagctcatggaccgcggtattgagtacattttcctctccaacgccgacaacctgggtgctgttgtcgacctccgcatcctccagcacatggttgattcccaggcggagtacatcatggagttgaccgacaagaccaaggctgat

SEQ ID NO: 15687 - DNA, 390 bp, Glycine max
  Coding DNA Sequence Number=SeqID_5908
tatcgggtatacgttttcttgcgccttgctgagtatgcaacatcgtctaatctcccccttggcccagcatattcagctgtttcaacacgctcaccatggccttcgccttacgatcgccacgagcggccacatgcacctgcttggcatgcgcgatcacgtcacctctccagcgccaaaaaagattctcaatctgctttgctacactcacgccttcgaccctagcaaccaactgacatacccagatcaatctcctcgcgctaatgaacctatgctccatcataggtcgaatgatggcggctcggactacggctttggtaaacagaggaccgattggcagagagtacgacttgaggtagttgtaaagagtgtatatggaacgccaagccgccc

SEQ ID NO: 15688 - DNA, 391 bp, Glycine max
  Coding DNA Sequence Number=SeqID_5909
tatcttcagtagtaacgatgagctaaagaacagaagtgtactgcagatcaagaattcacatgaatttcagttcaccagaagatgcaaaaaataataagttcggtgcaccccagcaggtcagcatacaacttgaatcactccctgaaatactccactgtgatagtcagcttcaaacccagcagcaatgcacgagtttctattcatggaaggctgaaatggcctcattactgctatttagaaacccttccatgaaagaatggtgagcaagattcccaccttctaaaccaaccaagagccctaccctccatagccaccatcacagctggcaccttttcccctcaattctccctctccttcacctaggtattcaagagacccagttctatccgtt

SEQ ID NO: 15689 - DNA, 493 bp, Glycine max
  Coding DNA Sequence Number=SeqID_5910
cataattcttattttcgcgggcgggggtatactatatatactcctcccttcgcgactacccctggccctctctcattggtgttttttcgtcgtcgatagacactcctccgatcactgtcctagtctctctcatatcctcgtctccttgtccctactacgatttcaaatcccctcgcgttatttaggtgtgtaatttgccccattctggccctgtcgttaattgactcgtctgctccttcttcctgcgtgtttgcgtcctaccccatctcacattatatcgttggtgtccgcgatactttcgcccgctccgttttatataaatttgcgttcccctcgtggcgtgcgtctcaccgcgcaaacacattcatatattgcctatttacccctcgttgcgtgggcactgcagcccgtattattcccacccgcggggcttcgccctgtcattcatacatattctatggtgcgtttgtagacaacagcttcctagtgctcg

SEQ ID NO: 15690 - DNA, 196 bp, Glycine max
  Coding DNA Sequence Number=SeqID_5911
tctagttatgaattacagtttgtaaatatattatggtctattgaccgttgctacaataaaaatgtatgtgttcttccaagtggttctgattgcaaactcacttcctgccttaaatgatgtcactgcaatggagcttcctgatattgtagctgaggctgccaaggtttgtgtatttttgtactatgaactctaattt

SEQ ID NO: 15691 - DNA, 450 bp, Glycine max
  misc_feature (26)..(26): n is a, c, g, or t
  misc_feature (413)..(413): n is a, c, g, or t
  Coding DNA Sequence Number=SeqID_5912
ttatgtctctagtatatgctttcgcncctcaatgtattattcgctcgcatgcgctggcacggccggcggcgtgtcatcttcctcggttctcgtatattttcatatttaacatctttattcattaatctctggtggtcgtatagcgatcgcaccgccgtgtctggcggacacttcgccgcggcaagcgtctccgctgtgagaatcgtgtagatctagactaacgcagacatagccatcaacatctcatcctatcatgttgacacatactacatatgtctcatagtatctcgtgacaagcgcttatatatcaatgtcttttcattatattactgccgttctacgtcacgtgtgtgctcacatatacagctccgagcgagacaacacgagcttcgtattcggctgtgtatgtgtantacattttcgacgtatcttctgtgtgatggttcccgt

SEQ ID NO: 15692 - DNA, 571 bp, Glycine max
  Coding DNA Sequence Number=SeqID_5913
gccgattcatctggcggcggtcagtcttctttctctcttgtctctcctacctccgccgtcttcgtggtggccattggtggtggtggcggtggaggatttgctgccggaggaggtgcagctgctggacgtggtggtggcgatgaggctgccgcagccccaaaggaggaacagaacgaagaatgaagaatctgaagaggaagagggagactttgcgatttgatctccttctggtaagagacctaaaacaaatttgctagtgttctgagggttttctatcccaattttctttttggtttctgagattttcgagaactatcatggaatgtcagaactaatacggttagtgtcggggttcagcttttcttctgcaaaaaactgatagtttaaatcccataatttttttgccacctcttgggtctcatcgaaaataaaacaagctttttcgatccccggcggaccctcaaaagatgtggtcccggcaccccacatttcgcccccatccttgcgagccgtatttacgccgggtcttccatagagccggctcgcttttaacaccagactgcttgacctg

SEQ ID NO: 15693 - DNA, 555 bp, Glycine max
  misc_feature (61)..(61): n is a, c, g, or t
  misc_feature (63)..(63): n is a, c, g, or t
  misc_feature (133)..(133): n is a, c, g, or t
  misc_feature (187)..(187): n is a, c, g, or t
  misc_feature (216)..(216): n is a, c, g, or t
  misc_feature (259)..(259): n is a, c, g, or t
  misc_feature (323)..(323): n is a, c, g, or t
  misc_feature (331)..(333): n is a, c, g, or t
  misc_feature (399)..(399): n is a, c, g, or t
  misc_feature (520)..(520): n is a, c, g, or t
  misc_feature (522)..(522): n is a, c, g, or t
  Coding DNA Sequence Number=SeqID_5914
tgtgcgtctcttcgtgatcgctctacaagtacaccacggcgtacctcactactctacgtantngtcatacacgtacatattgtgtctcatcttatacacctcatcagactcacacgcactatactccaatctntctgcgctctcgtcactccctgtctacatcatagatacatatgatacacgcaancatatacaagtactgagcggcacaacacncaatagtatagttatcactaactgacatgctcactatccgagnatttccatatatatattatacacacacgtctactcacagacgtacacacgatttcgtacttgcntatttacnnnacctactctccactcatcacaactcctactacgacacacacacactattgagggcgttactcgctncgctctcgaccatacatagtcggtcgtgcagtcactacacactataggcgcacaacactatacgtatatctatcacactcatagtaacaccacagcttacacatcacttcatcacactgtncncgatatacagcgtatagttgtcgtctatcccta

SEQ ID NO: 15694 - DNA, 554 bp, Glycine max
  misc_feature (211)..(211): n is a, c, g, or t
  misc_feature (237)..(237): n is a, c, g, or t
  misc_feature (285)..(285): n is a, c, g, or t
  misc_feature (398)..(398): n is a, c, g, or t
  misc_feature (485)..(485): n is a, c, g, or t
  Coding DNA Sequence Number=SeqID_5915
gcgtgttacgcagagtgtcatgagtggctgagtgccgtggtcagtatgcgagacagacagcgacacatcactatatggatatagatacgatgagagagatgcgtgtcgatgtgggcgacgcaagcgtacgctagcacctgtgatgtaggtcacgacagcagcggcgtgagtctagtgaccacggccgacacgtacagcatagctaccccantcgcacaattcgcgtttgctggcagntcgtgctgtgccgacatcaccacgacagtactacagcttctgcgacantacgcaggtcggagtgtacacgtgacgtatgactatcacgactctatgagtcagatagataccctatactacgaggacatgtcagctgcatatgattcgtcttacgtctgganacgtgcagtgagagtgtacagatatcgtatcacggcgctgctgtatctaatcagatcagaggagagagacaagtgtgtagagtctgnagtgtagatgtgatcgtcggacgcgggtggacgatagtcgatatagagcgctcatacatggataccatg

SEQ ID NO: 15695 - DNA, 339 bp, Glycine max
  Coding DNA Sequence Number=SeqID_5916
ccttctgccaccaagtgttacgaaaatctctctctctctctctcacacacacacacaaagtacgcaagcaatggcaaacaaaaactttctatgcattatagaagaaatggataggctttggtttcaccaagctattcttttctcagaaccaacagcatcagttatttcattaccatctccaccagatgaaaaaaaacctgttcctacatcagaatccgtgtcttgctcatcatccattctttcttcaccacctccaccagatgaagaaacttcaacggatgaatcaccctcttcagagcaacaactctcatcagaatcaatgtcagtgcctcttcagga

SEQ ID NO: 15696 - DNA, 61 bp, Glycine max
  Coding DNA Sequence Number=SeqID_5917
cgtggcgcttggctctaatgcccttcatcttaaatgaacacacacgctggaccgatgtcaa

SEQ ID NO: 15697 - DNA, 479 bp, Glycine max
  Coding DNA Sequence Number=SeqID_5918
acgcgaccgggcgacgcgcatgataccccgcgccgggaacgcaagaccgcctctcggccgaattggctatcttcgtctgctgacgacgacttggctaatctacatctactacgagtgagactgtctgtagtagggtggtggtctgtggtgctgaatattactctcctacatgtacagagagtgcgaagaggagggcgcgagcgcaagaacaaaagatgactaatatatagagagtttaaacgagagtatatatctgagataaaacgcctagatgccgcaattgagcgtcgagaggggggagataacgacatcatacaacatttcctaccactgaggttagagcgtgggtcaaatagttgttttttggggcatctattaacatcaaattttcttgtagaatacatgtgaataagtggttaagtgaataatagaactccaatagagaaagaaaagaggttgatctgaaacacttcgaactt

SEQ ID NO: 15698 - DNA, 376 bp, Glycine max
  misc_feature (29)..(29): n is a, c, g, or t
  misc_feature (292)..(292): n is a, c, g, or t
  Coding DNA Sequence Number=SeqID_5919
agccctgtgactcacaatgtggcgaccgngaacaaggctggatatgatagctgcaagactccatgaggagcccgagtgtataagccagggactgatccgaccagacttgccaggggagaaaactactccctcctgcattatgttgggccctggcaggctggaatgaaaattgccatcaacggtggccgggcctaatattaggggtaaccttccccaccatattggatggaaaggccaattgctccccttaagggggaaattagccccctttaatttaaggttaaaaaaaaanaaaagccaagcgggggccctttctaataagggcccccttatctaataaaaaataaattggcccgcggcgcgaaaacaaataata

SEQ ID NO: 15699 - DNA, 428 bp, Glycine max
  Coding DNA Sequence Number=SeqID_5920
ggattcctctgcacaccagaacgggggaattgagggggagggacaagcggggccactttacggcggatccggtggtagacaccgtggaagcggcagaggactacaaaacgacacaggaatggggatcatcgggccggcgccgtcagcggtgcgcggcagagggggcgaccctggaaggcaagggtccccagaagaggggatttgcaggggaagggagatcatggcgaacactcagcagatgtggtggttgacactggcgaagacgcgggggacaacagaagggcaaacgagtgcgccacgaaggccagggtcaggttgacgtggcaaaggctcgggttcgatagggcgagggagcgccaaaggggggaagctatggccaagcattgggatagctacgcagcgaagagcaggtagatcatgacacgctg

SEQ ID NO: 15700 - DNA, 286 bp, Glycine max
  Coding DNA Sequence Number=SeqID_5921
agttgcaagggtttgatatacccattttttctctttatatacggtttccagctttaattattttctcttgtttttgtttttgtttaaaaattcttaattaaaattctttgtgcaggaggcagctctcaaaatcatcaattctcactcaaaagaagatgccctgaaaatattcctggcggtaattgaaatgttttttttttcttttttgcgattccgtaataattgttcacttttattcagcagatttatcagaactttttttgttgtggggtatacacgggatcct

SEQ ID NO: 15701 - DNA, 561 bp, Glycine max
  misc_feature (113)..(113): n is a, c, g, or t
  misc_feature (155)..(155): n is a, c, g, or t
  misc_feature (328)..(328): n is a, c, g, or t
  Coding DNA Sequence Number=SeqID_5922
aaagtaaaccgatatgaagccaaaggggcataaaggagagatagagagacaccgccggcgcacgcaataaattgttaagtgaaaaaatagtgggaagagatagacactaaaanatatatagatgatgcgagacggaaatcgaagatacgaggaanagtataaagatatgagtgagagtagtgtatagtgttatatgatgagattagtggaatcatatgataaaagtgaatgggctcacatgatgcagagagtgatgtcggacggagtgtgtggtttaggggtgttcgtgccggtgaggtggcatgtgaggccgctaactactagggancggctctcgtcgtacgtatataaatacgtacgaatgcttcggcgcgtgtatcgtagggaagagacgtagatcagatgacacaaattatgacttatctagggtgtgttgtggagtgacggataaagtgctcgtggtgtgtaggtatattgatagacatcgagtcgaatctttgttggagcattaacgatttgtcactacacctcatagtaacaggtagtgtatagcgcagagga

SEQ ID NO: 15702 - DNA, 261 bp, Glycine max
  misc_feature (151)..(151): n is a, c, g, or t
  misc_feature (159)..(159): n is a, c, g, or t
  Coding DNA Sequence Number=SeqID_5923
gggaggactaccgatgcctactgcgtggccaagtatggcaacaaatgggttcgaaccagaactctgcttgacactctctcccctcgatggaacgagcaatatacctgggaggttcatgatccatgcactgtcatcacggttggggtatttnactaccancacatcaatgggaacagggctgccagatatcagatatttgtaaaggtgacaaacacgcgtgcaattctcgaaactgatcgtgagtatcaacagttctatcgt

SEQ ID NO: 15703 - DNA, 450 bp, Glycine max
  Coding DNA Sequence Number=SeqID_5924
ttaatccttcggtcgctcggtcgcagtcgcaccgccgtcaacgacaacgaccaccgcgcgaggatcacgcccgtccccccttcctccgatccgatctcaccagagcgagatgggtggacgcggaggtcgcggaggtcccgggggccggggcggcggccgggcggcaggggcaacgccgctggccagggagggccagtggcagctcccgtcatctactggttctgcgagcactgcggggatctgcgccatgacaatcaagcacgtcacctcgtgaaccacatctacatggaacaccaggaaacccagcagcgcctccgccagctgcaggcgcgtgaggcgtatcagcgagcccatggtggctcgaagaagaggggcaaccgccgccgccactgaatgaaggtagaagactaagtaacactactgaagtcacctgcgcaaatcttccagcat

SEQ ID NO: 15704 - DNA, 477 bp, Glycine max
  Coding DNA Sequence Number=SeqID_5925
gcaggacttccttgagtccagggttgcttgcgcctctaccaagctcgggagcaacgatgttgatgctgtgtccacagaagtggcaaaaaaagataatgagttcctacagtatacaatggcaccatgggtttagaggttatctgaggacaatgctagtgttgtgtgtcacatggagagttacacttatgcagtgatttattgccacctatcagagaccacaatagcgtattctgtcccattggcgggtgctgatcgaagcagggtcaaaacagtttcattgtgacatactgtcccatcaaagtggaatactaagcatttggcgtttcaagtgcttaaggactatccaggaactgttactatgtgccactacctgactcaagagcatgttgtgtttggtcccaagtataaaagtgtgttccttcccaaaataatgtgttatagtctatgcttcataccgttgatcttgtggtcacactt

SEQ ID NO: 15705 - DNA, 572 bp, Glycine max
  misc_feature (26)..(26): n is a, c, g, or t
  misc_feature (33)..(33): n is a, c, g, or t
  misc_feature (69)..(69): n is a, c, g, or t
  misc_feature (123)..(123): n is a, c, g, or t
  misc_feature (208)..(208): n is a, c, g, or t
  misc_feature (243)..(243): n is a, c, g, or t
  misc_feature (346)..(346): n is a, c, g, or t
  misc_feature (355)..(355): n is a, c, g, or t
  misc_feature (375)..(375): n is a, c, g, or t
  misc_feature (401)..(401): n is a, c, g, or t
  misc_feature (469)..(469): n is a, c, g, or t
  misc_feature (519)..(519): n is a, c, g, or t
  Coding DNA Sequence Number=SeqID_5926
agtactggactctcacgacatcctgnacatgcnatattatcacaccttagtcgctgccctctgccctcnctccctcgccgactaggagtcgctcatgcgacacttcgcagatatctcactcgngaggacgggaggcccgtgaccctccactcacttgcccttgtcctcatccagcgacacgacgtcacgtaacactaagaggagtgancaccacaaatgttggtggcaccggcgcgagagtgncagatagacttgccctactctctcctctcaccaagtcaatcagcgtaggtgtgatcggcgaaatacaagagcgagttgctctgcgcgtatcgtcatgcttagncggaaggcngcaataataacgtagatatnagatctcatagacgcgtctctgcacntaatcccgaaatatatacatgcacttatcacctgtctctcgcacacttagcgctcgctcacctgctcnatgcgagccgcgtgacgcaccgcttcgccacagatacagcacctatcttnacgcacgagttcatgtgcacgctcgctcgtgcactactactcttcagtgcgtg

SEQ ID NO: 15706 - DNA, 549 bp, Glycine max
  misc_feature (135)..(135): n is a, c, g, or t
  misc_feature (151)..(151): n is a, c, g, or t
  misc_feature (265)..(267): n is a, c, g, or t
  misc_feature (272)..(272): n is a, c, g, or t
  misc_feature (279)..(279): n is a, c, g, or t
  misc_feature (488)..(488): n is a, c, g, or t
  Coding DNA Sequence Number=SeqID_5927
ttacacaggcgtcgctagacgtagtatggcgtgatatgagtgacgtcgatgatgcgacggggtcaggagtgtgcacacactcaccgaatcaagctcagtgataggcacgcagcacagctgatactctgcattagngacgcatcgtacgttnatgtgcgctaggaccgctctagctgtgtattttatctagtaattcaagtactgttgttatacaggagagatgacagagtcaagtgaatgcgagcgtgatatggaggaggagcannncccanacctacnacctccacagtgtgacacttgcatatcaagtagcgaagagagtgaagatcagcgagacgtggtgaggtgctcgccgaagtgaatgtgagagagtgtcagatagcagagtcgcgcacggacactgtgcacgtaccaatacaagagataagacacagagcaatatacatgctatacggcgtcatgcgcgacacgtgctagccgcgcgcgcntacgcgacggcatgaggatgagcggagcgcagtgtcagatgctccacactacacactgtaa

SEQ ID NO: 15707 - DNA, 568 bp, Glycine max
  Coding DNA Sequence Number=SeqID_5928
atacatcattactttttgcgttaggtttcgtatttatgtttactatgggggattatcaggtgtggttcttgctaacgcatcacttgatattgctttccacgatacttactacgtagttgctcatttccactacgtgttaagtatgggtgccgtatttgccttatttagtggatgatacttctgaatccctaaaatattagggttagattataacttactatattctaaagctcacttctgagttctatttactggagttaatttaactttcttccctcaacacttcttaggattacaaggtatgccacgtagaattagtgattaccctgacgcctttacaggttgaaacttcattagtagtattggttcacttatctctgttgctgctactgtgttattcttacacatagtatacttacaacttgttaaagggaaagctatatttggttacccttgagcagttcctcaactatttagtgattacttaagaatacttaaagataaatgtgctccagggttagagtgagcattaagtaatccacctaaacctcacgcattactagcttac

SEQ ID NO: 15708 - DNA, 504 bp, Glycine max
  misc_feature (172)..(172): n is a, c, g, or t
  misc_feature (371)..(371): n is a, c, g, or t
  Coding DNA Sequence Number=SeqID_5929
tatacatactatccactctactcacaccacaactagcgtcatctcatcgttcggctcctgtcagaccagaatcgtgtgtcttttgtcgtgtgttgttatcgtgcagttgttgtactctctgccttgtatctatcgagcttcgcgattcttttcctgtttgttttgctatttnccatatgtgattatatactcttatatatctctcctattcattgcagtcgagtattacgatgaattcaatgcacaaccaaccatcagacacatacaacacacacacaacacaccaccctcacacactcaactacataatatatcctcatatatactatatatattttcgcatatactattcacataggcatgtgattgcntattctagtgttgttgtcagatcgtgttttgttggcagacagcgattaggaggagaggtggagcatgctgtccctcgcgcacagctccgcgcccgagcggttaaattattgtgtaaggcaggagagcgctcat

SEQ ID NO: 15709 - DNA, 473 bp, Glycine max
  Coding DNA Sequence Number=SeqID_5930
ttataacctaatatcatctccctccctcaaagttcgtcgcccagtttcttcatcaactcagcggctcgtgtcttctttcttctctgctaaagaaaactatggcgtacgcaccaccgatgaagcaaggaaagacaggattagaggagcctcaagagcagattcacaagattagaatcactctctcctccaagaacgtcaaaaaccttgagaaggtgtgcactgacttggtccgtggagccaaagacaagagattgagagttaaaggaccagtgaggatgccaactaaagttcttaagattaccacaagaaaggctccttgtggtgaaggaaccaacacatgggacagatttgagctccgtgtacacaagcgtgtgatcgatctcttcagctccccagatgtggtgaagcagatcacttccatcaccattgagcctggtgttgaggttgaggtcaccattgctgattcttagatg

SEQ ID NO: 15710 - DNA, 573 bp, Glycine max
  misc_feature (131)..(131): n is a, c, g, or t
  misc_feature (247)..(247): n is a, c, g, or t
  misc_feature (262)..(262): n is a, c, g, or t
  misc_feature (284)..(284): n is a, c, g, or t
  misc_feature (317)..(317): n is a, c, g, or t
  misc_feature (388)..(388): n is a, c, g, or t
  misc_feature (429)..(429): n is a, c, g, or t
  misc_feature (431)..(431): n is a, c, g, or t
  misc_feature (547)..(547): n is a, c, g, or t
  Coding DNA Sequence Number=SeqID_5931
tataggcacatatagcgcgttgctggatatgatagccgtatccggcacgagacacgagcggtgacgtcaggactcgcagatagtctcggatcttctttgtttacccgtctgtaattattaatgattagcgntctctagtatcttcataatttccgcacacacattatatataatatagtatctctatagtgttctcgccctgtctgtgtgtcctctttactacgaggtacattgcgtactgagcatncactcctccgcctcnccactagcgtatgagcctcacntcagagaagtgcgagcgtgtgtgtatacaaganccaattctcactagaaactatgtaacctcgttgtttctatctacgctatgcgacaatatagcgtctctctntcttcgatcaggtgatatcttatgtaagagatcgaatattnanacgtctctctgaggagaatgagtcatgtcgaaccagcccgaatcgttagtgtgtcgttgaggcggagtaacacggataagatgcgcgccgcgagtatggccatcatcctcacgtangtgagatacacacatgaccgcactct

SEQ ID NO: 15711 - DNA, 406 bp, Glycine max
  Coding DNA Sequence Number=SeqID_5932
gccttgcacgtaccgggccggaattcccgggtcgacccacgcgtccgggagcagcagcattaacccaggaggactgttttgtcaaattatgaagcataaaggttccaaacaaaatagcaatttttgtttggagacttattagggatagacttccgacaagacacaagttacagcgaaggcaagtgcaggttgctgacatgtcatgcccattctgcagagtcaaagaggagaacgcaggacatctatttttccattgtacaaaaattcagcctctatggtgggaagctatgtcatggataaatctaaaaggagctgctcccctcaccccaaaaatgaatttcaatcaacatatgggactccaagctgatggtgttaggaccaacaggcggcagtgctggtggatggc

SEQ ID NO: 15712 - DNA, 536 bp, Glycine max
  misc_feature (44)..(44): n is a, c, g, or t
  misc_feature (79)..(79): n is a, c, g, or t
  Coding DNA Sequence Number=SeqID_5933
gtgcgtcacctgttacagcagggcagtgtcatatagtgtaatantgtgtcgtcgatgcggtggtgtataatcattacantgtatatcaagaataagatatacatacatagagagatagagagaagacggtgtatgaatcctgacatagtgacgcgaagatatagtacacattatacatgaacattacactacgtgtgacagtctagtgtgtattggagtgagtaataggcatatattagttacgtgccacaatgcgtataccccttatactagcagatttcctagctactcataaccgtaatcttgtacatgagtggatgagagagagagttaggagctgtgagattagagttagagacctaatatggaagagatcagtggcgcaatgttaatgagatataatataggtatttatgtgagagaaacactcacgttatattacgttgtagtctctctctagatcgctattattgcggacaccacattcatctatgtagttacgcctctctgctagtacgtcgtcgtgtcacccgagt

SEQ ID NO: 15713 - DNA, 433 bp, Glycine max
  misc_feature (392)..(392): n is a, c, g, or t
  Coding DNA Sequence Number=SeqID_5934
gcacattaatgcttcaagttaaccaaacaaatattttcagtatgtgtatgatcaacattaaagggacactctactgtaaagtggtctagaatgtgaatcttttctacatacctaatgccatctaaataatgttatccttgataaactaactgcttctattaatttagctcaatttcatacagttgcacgttgggatgatatagaattaccttcatctcagcatttggagtcaaagaatgacaaacttgtcagcattggatatgtcggggatgaatgggatgaagaatatgataaagggaagaggaagaagataaggggcttcaagcatacttggtggcctaatcttttcaaaaattgcagtcgagaaatcgaagttaaaaggcaagttgccntctgtcaggaccctcattagattgcgccaaactttcctcat

SEQ ID NO: 15714 - DNA, 248 bp, Glycine max
  misc_feature (69)..(69): n is a, c, g, or t
  misc_feature (77)..(77): n is a, c, g, or t
  misc_feature (96)..(96): n is a, c, g, or t
  Coding DNA Sequence Number=SeqID_5935
aaagagagctttcagggattcaggagcgcctggagcgtgccgcccaagcgtgcgattcctgcagctggnctcggcgngcttttctgccgcccgatncgcgtttctctgatcgctgcgattccacattactgctcgaacaactccgtccgccaccaggcgtgtgatgtttaagggtccaacaggacccgctgtgcacgggaaaggccaaccccccccctttgggacagggggatcccaaatccatccgg

SEQ ID NO: 15715 - DNA, 407 bp, Glycine max
  Coding DNA Sequence Number=SeqID_5936
ggctttctagaaacaaccaaaagagtctatcagctcgacaaaaacatgggaagggaaagagacctcggtaagggtgggaaccgcttttggaaatccattgggctaggatttaagactcccagggaagccattgaaggaacctacattgacaagaagagccccttcactggcaatgttatccatacgcggccgatacttggttggacatgtcacacggctaagatgaacaggactattattgttagcaggaattatcttcattttatcaagaagtaccagaggtaccagacaaggcacttcaacactcctgctcatatatcacctgcttttcgcgtgaaggaaggagatcacgatattaatgcgcaatgcaagccactttctaagactgagacgctcaatgtgttgaa

SEQ ID NO: 15716 - DNA, 430 bp, Glycine max
  Coding DNA Sequence Number=SeqID_5937
aatcgctctccgaaggcggaaaacgcctcctctctctcctcctcttcggttctcctccgcgacctctctctccatggccgccacgaggaagctcggcaggtcggcggcggcgtaggcgaaggaagacgaaccggaggtgctcctctcctcgcgctccttcgccgacctcggcctccaccccgcccccaccctctgcgcccgcccacctccaaggaggctcctcatctgatctgagcaagtagcaaaagtagggaattacacaccttggttattgagcagcagcagcatcagatcgtgtgctttgagagaagagtagtgaggatgaggctgtggtgttgatgtaaactaaattttttgttcctcttcttgttgctttgttcccaacgtgtgattctgacagagaatggtccagataacaaccaattgtcct

SEQ ID NO: 15717 - DNA, 523 bp, Glycine max
  misc_feature (77)..(77): n is a, c, g, or t
  misc_feature (106)..(106): n is a, c, g, or t
  misc_feature (128)..(128): n is a, c, g, or t
  misc_feature (136)..(136): n is a, c, g, or t
  misc_feature (238)..(238): n is a, c, g, or t
  misc_feature (359)..(359): n is a, c, g, or t
  Coding DNA Sequence Number=SeqID_5938
gtgcaacttcgtgctacgcctaacaccgcgggtttcatttattgtctagtaatcgtgcgcattgtatatctcgctcncatcgctggtttagagcgctgacgcaganttcgatgtaatacaccgtcatngtgtagangccctcaatacaatcttccacaatgtaagaccgcgtatatataatattcatatttctgtgtactgcacgcgctctctcgacacgaacggaatagacgctctnaggcgaatctagtagatcagtcgatgtgtcgttccacgggcgccctagtgtcgaaatagtatatacatacatatctgtgattcgccgacacagtcacaatacgcaaccagcgcgggtgggnaacatatagtaaccgtcggagttgacatatgacccatcagctgtaggtttagtatcacgcgctgccgcgagttacactctttcgagctgaacgtaacgcggtgcaacttgttattgatatatgcgcgtggatattatcgttatattccacatggctgagcgcgc

SEQ ID NO: 15718 - DNA, 335 bp, Glycine max
  Coding DNA Sequence Number=SeqID_5939
gaatattgaagtcatgatcagaaaaaaatcaaattggatggtatctcaggaaagtggaaaatcataaggacacttcagaagactacctaaaaaaagaataattcaacttttggaaataaagaaatggatgggggaatgaatcagctttgaagtgagaaggttggagatgggaagccaaaaaccatgcctccagcaagtgtgatgacaaggcttatattgattatggtgtggagaaaactcatcagaaaccccacacctactctagcctaattgcctcacttggtctttgttcattcaagggatgggagatcctgcataatgcaagttatctcata

SEQ ID NO: 15719 - DNA, 589 bp, Glycine max
  Coding DNA Sequence Number=SeqID_5940
ggcgattcggtacgtaaccatcactcgcggatttgggggtgggtcgcgggcgtggtaccggtctgtccgcgccatgttccccttttaaaaaatgcccgtgaggcgtgttatctgcttgttgaatcgccaactgtggtgtgggttaggattttgccccccctgacctctttcccccggtctcatggtatttatacgccttcgccttgggggcttgtccaggtcttgttgtcaaagtgcggggcgaccgacttcatcttcttgcgccgcgccccccatgtgctctgtcttcttctttgccctcttgtgagccaccaccggtccgtcctctgcattcagcacgcagcagcatctcagacagatcatcatcagtaggctgcccccgtcctacagcgcctgatgagtccccagcacagacggcatgtaagacgtctacccgctcgcaccaacgtacctgcggccagcagcagcagcatggcgaggaggacggccgtgaagagcttgcgagagagctccatttcttcctaggatctcagcggcgacgggcgacgctgtgcgacagagtgggaatacaagctgaaaccagccccgt

SEQ ID NO: 15720 - DNA, 298 bp, Glycine max
  Coding DNA Sequence Number=SeqID_5941
gagaggagcagcgttgtattcagtagaaatcaggaagaaggaataagggcaacagagaagtgtgaaaacatcaaaaaggagggaccagggccagtgacaagaagggtgtcgtatttgcaagcatgagcaattgtaaaagcggcggggacaaagtaagtttaacgcaaaacttggatgtctgtatcatctttcggagcttcctcttcagcctcgtcatacgcttcttcttgcgcttggccctcatcgcgaaaagaaaacagaacccttcttcgtttcctaaccctagccgaggcggctg

SEQ ID NO: 15721 - DNA, 401 bp, Glycine max
  Coding DNA Sequence Number=SeqID_5942
gagttagccctaacaaggaccttgtcacattcactgccatgataggaggctatgcaatgcatggaatggcagaagaggcagtagagctgttttctgaaatgcttacacttgacattaagccagaccatgtagctctaactgctctgctgtcagcttgcagtcatgctgggcttgttgatgcaggaatcaaggttttcaagttcgccagagatatttacagagttgtaccgacagcagagcactatacatgcatggttgaccttcttgcccgcggcgggcgtctccaagacgcatacaattttgcgttggatatgccccctcacatggccaatgcaaatgtatggggctctctgctaggagcatgcaaagtccacggagaggtcagaatcggccagctcgca

SEQ ID NO: 15722 - DNA, 288 bp, Glycine max
  misc_feature (116)..(116): n is a, c, g, or t
  misc_feature (121)..(121): n is a, c, g, or t
  misc_feature (163)..(163): n is a, c, g, or t
  misc_feature (209)..(209): n is a, c, g, or t
  misc_feature (222)..(222): n is a, c, g, or t
  misc_feature (251)..(251): n is a, c, g, or t
  misc_feature (261)..(261): n is a, c, g, or t
  Coding DNA Sequence Number=SeqID_5943
gatcaaaatccggtatgtcactctttacagaagctgtgactagtttccaacatgcaatgcctttctgtacatgttgctgattgtggatgctgaacactagggtcatgaatgattanatatngtcctgacattctgtactttaccttcgaagctctcgtatgtntgttccgaattgaatgctttaactgatccctcaacgtgttcaaacnccttctttcatgngtgccccggaaaccctcggcttgaatatntggctccctnctgctggattacatgcctgtgttcatc

SEQ ID NO: 15723 - DNA, 548 bp, Glycine max
  misc_feature (119)..(119): n is a, c, g, or t
  misc_feature (121)..(121): n is a, c, g, or t
  misc_feature (125)..(125): n is a, c, g, or t
  misc_feature (133)..(133): n is a, c, g, or t
  misc_feature (149)..(149): n is a, c, g, or t
  misc_feature (171)..(171): n is a, c, g, or t
  misc_feature (175)..(175): n is a, c, g, or t
  misc_feature (211)..(211): n is a, c, g, or t
  misc_feature (238)..(238): n is a, c, g, or t
  misc_feature (253)..(253): n is a, c, g, or t
  misc_feature (256)..(256): n is a, c, g, or t
  misc_feature (259)..(259): n is a, c, g, or t
  misc_feature (279)..(279): n is a, c, g, or t
  misc_feature (282)..(282): n is a, c, g, or t
  misc_feature (337)..(337): n is a, c, g, or t
  misc_feature (339)..(339): n is a, c, g, or t
  misc_feature (342)..(342): n is a, c, g, or t
  misc_feature (347)..(347): n is a, c, g, or t
  misc_feature (366)..(366): n is a, c, g, or t
  misc_feature (437)..(437): n is a, c, g, or t
  misc_feature (468)..(468): n is a, c, g, or t
  misc_feature (501)..(501): n is a, c, g, or t
  misc_feature (511)..(511): n is a, c, g, or t
  Coding DNA Sequence Number=SeqID_5944
tgatgacatctacgagtgctgcctccgcgacacgctacctcgatctcgtatgatcgtgcatactcgacagtctgtcgctgcagccctcgagcgacgtcgtatgtctgatcaacgttacngnctgncgactgangatagaatgatgtatngtcgtgacgtaattcagttcgncgancgagcagtcgactctagaacacgtctcagtactgcntagttgatgctagcacagagacgaganatgatgcgtagtagnatngtncggatcattgatcgtctgcngtngctgagatgatgctgacgtagtatgcagacgatcgcaacagtgacgcacataagntncgncgcantgaactacgatgtgtttangatggatcgtatgagcgacatcatgagatgagtatgcgtatcatagtatgaaaacgcacgttatattacanagaacatgctacgtaatatatagtgacactngttcatggacatcgaagtctggctgactcatcntcgatgactngctgtgctgactgcgtatactgtgtcgcgtgtgagta

SEQ ID NO: 15724 - DNA, 139 bp, Glycine max
  misc_feature (60)..(60): n is a, c, g, or t
  Coding DNA Sequence Number=SeqID_5945
atggattcttttaataaacatattgaaatgggtacagggcaaatagaagcaattccgatnttactttggaagcttttactaaacagatccatgaggctgataaacacaacggtaactttcacgggctacttcaaaagct

SEQ ID NO: 15725 - DNA, 556 bp, Glycine max
  Coding DNA Sequence Number=SeqID_5946
ttgaacattttcctcggaacgcccggagggattgcacgggcaattccaaattccactgggcccggtccaggtttctggcattggccccaaggacccgccaaatatccggtccttgccggccaggattccaaggtgtccaaagtggggggctgccaagccatttttgccagatattcctcggggaacatttcgtccagttcttaacaactgcccgtttcgggggaaattatcttagtctagccatccgggccttcggggtgggctgaagaggatgctgcttccggacccagagagatgcaacgctgggccgcggccacccttcataaaggagtgtcagaggggtcccttgagtaaggaggcggtccatttaaaaatgtttgaatcatcgcgagctagctgaatatcaagatcagcagccttgttccgctgcacctctttgtgctcccttgaacagccttacccgcgatgcctgcatactggatatgcgcaaccgtgtcgcaactctttggatatcacgagatgaaaggaaggaagcattggtgtatcgcgtcgggac

SEQ ID NO: 15726 - DNA, 567 bp, Glycine max
  misc_feature (35)..(35): n is a, c, g, or t
  misc_feature (67)..(67): n is a, c, g, or t
  misc_feature (111)..(111): n is a, c, g, or t
  misc_feature (126)..(126): n is a, c, g, or t
  misc_feature (275)..(275): n is a, c, g, or t
  misc_feature (306)..(306): n is a, c, g, or t
  misc_feature (347)..(347): n is a, c, g, or t
  misc_feature (460)..(460): n is a, c, g, or t
  Coding DNA Sequence Number=SeqID_5947
tgaatactctgctcgcgcaaggtgcgactgctaantgagatgtactcgtgcacagatcgctaacacntcatctgacctccactgagtgctcatcatcttccgccgcacgtnccatacacactcggngcatccacttgtctgctacaggacacctctcctccgtccgagctcgactgtgtgcatcgcctctcgatggcagtcttatatctgcgagtcatatgatcgttgatcattgcgcgactatacgcacgcgggcgtcgctctctgatcacgantcattgaatcgatgttataagtacactatcncatcgcgtcacactcgagaattatctgtagggacgcacgtncgaagctctatgaggacatatatagcgatatgtctcggagagatctgcgtctacgacgcaactgcggacgcgcagtgctgtgactgacgacgtatacggtcgatacacgtctntatggccatgtcgctactctctctatttgcatctatcacgcgcaccagtctataccctgcactatacctgcacctctcactcaagcgctagtactctactctttcgt

SEQ ID NO: 15727 - DNA, 375 bp, Glycine max
  Coding DNA Sequence Number=SeqID_5948
ttttacaactacaccggagcatcaccccatggataaaggagagggctcacggagacaggaaagccacaagcgaaccgcgcagacaaaacgctgggaacggatattgaaaaacaaggttccgacggcgaaccgcaagcgattaaaaaacaaggaagaggtcacgaccaccaaacatggaggcaaaggacggggaaacaggacagacggaacatagccagggggacagcgatattgacggaggaagcagtaaggacccccaagcagacaaggaagcgaaaaaaaaaaccaatgtgaggcaatgagaaagcaagcaaaggtaatgctaactgcgcccccttatgcggggcaacagcagcaagccagcaccaaaacaat

SEQ ID NO: 15728 - DNA, 539 bp, Glycine max
  misc_feature (32)..(32): n is a, c, g, or t
  misc_feature (44)..(44): n is a, c, g, or t
  misc_feature (80)..(80): n is a, c, g, or t
  misc_feature (366)..(366): n is a, c, g, or t
  misc_feature (376)..(376): n is a, c, g, or t
  misc_feature (417)..(417): n is a, c, g, or t
  Coding DNA Sequence Number=SeqID_5949
gtgacacgcgcatatgtgctcataacacaccncactcggtgcanctcctactagccactcagtgtgtacttcgtatcagntcatagacctctgccgcgcgtcacgcgcaccgtcgcacacgcgtctacaaacaaccaaagactacgatgaatgcggcgactagtcgtcacagtcaaactaacgtacgactcactgcagatctctgcacatcgctcatatacaacgctctgggcgcgggtgagcccatgctaacaagacaacagcgtacacgcgtatatccatagtagacgtcgcacgccgcgctagcgtattaacctactatatacatactatcgcgtgtgagcgcgcaatgacatcacatatagncgctgacggncgtgaccgccacgacacacatacgagataaaccacgaggcngtgcatgctgccatcaactctagcgtgactagatgtgttgctgaggtgtgcgcacgtgtactgacgcagccgacgcgtctacgccatctgcgccagctacatcgtgtgcgaggctgagctca

SEQ ID NO: 15729 - DNA, 490 bp, Glycine max
  misc_feature (64)..(64): n is a, c, g, or t
  misc_feature (308)..(308): n is a, c, g, or t
  misc_feature (399)..(399): n is a, c, g, or t
  misc_feature (412)..(412): n is a, c, g, or t
  misc_feature (415)..(415): n is a, c, g, or t
  Coding DNA Sequence Number=SeqID_5950
aaggaattgcgttccaattcttcgtcttctaagtcttccaattgctctttcaaaaatttacggngaagttctccttttggatgtttgatagaaattccttcaagaattacttcgagattttcaatttgtctgccattgaggtcagaatctgatgtatcgagttttctttgggcgttgctcaatgcatttaaaattaatcgttcaatcacggaatccatgttacatatattttcaaagatggtagctttttctgttcgaattgattccaatttttggttgatatctgcaatcttatttctgcattttgngatttctgctgtccatttgaatttgcgagcctttgacaattttttttcacattttgcaatctttttctcaagttcttgagtttgatattgncttccataatcgnganaataaagaagttcataatgatttcgaacaatttcattcaaatccaataatgttgcactttttgctttcaaacaca

SEQ ID NO: 15730 - DNA, 401 bp, Glycine max
  misc_feature (31)..(31): n is a, c, g, or t
  misc_feature (69)..(69): n is a, c, g, or t
  Coding DNA Sequence Number=SeqID_5951
tgatatgatattacccatcgtgatgtgatgngcctcatagagatgcgtcatctctcgcgttagatctcnctctcataattgattctgtctttatcatattaggtattgtattaattagtggagattaagtagatatacatcaacatataatgacatatacgatggcataagtttgtttgttgtattatatgtgatctgagtatttcttatacctcattgtgacactcagttgtgtagtgggcaggcggtgtgtagagtagtcctagttggaagtagcgcgtgtagagacgtgttaatttactatctcacagaatatagtatattaggtgataggcggcaggtggcgagagcgagcgcccgtctgattcaaagatagtacacaatacggtggcgaaggcgcg

SEQ ID NO: 15731 - DNA, 394 bp, Glycine max
  Coding DNA Sequence Number=SeqID_5952
tatctatacacatgccccaatgagtaacagtaggctcgttcagctgtggagcagaagtaccaacatacctttgtgactgcccctgccactcttagactttacttccatgatcgctttgtgaggggttgagatgcttccattttgcttgcatctaccaacaacatggcacgagaaagaccatcctgatgatatttcactcgctgagtatggctttgacacacttgctagagccaaggcatctgttgatagtgaccctcaatgcataaacaaaggcgcttgcgctgatatacttgctctggctactagagatggataaatttggctgatcaaccattttatgaatttgaactgaatatacgtgacagcatcatatctactaattgcagagctgcac

SEQ ID NO: 15732 - DNA, 442 bp, Glycine max
  Coding DNA Sequence Number=SeqID_5953
gcagatatccatactagccagctatactactcgatcgatcaatttgaatcgcgacttgtaagcttgagtgacggtactgctcaaagacatcttctacaatgaggcatctcaagggtttgcatcaagccaccatcttccaatcaaacatattcaggtagatcatcaacgacatgtgcctatgatatctactgctttggcaagaccttacttgatctcattaccggtcacattgaaggcactcagtgtacatgatggctctaccaatgagcgctaacagcaaaccttgccttacatcactatgtactatgacgaacgcgtgactaagattattgacccatcattgatcgcggatgatgacctgttgtaataggtatgagctatggcaactgtgggccatgcatgcttgaatcccaagccttccaaacgaactcctatcagggat

SEQ ID NO: 15733 - DNA, 529 bp, Glycine max
  Coding DNA Sequence Number=SeqID_5954
cttcctcactgctgtgtggctagaggtctccccttcagaccctttcgccttctttccctttcttccctccttcttctcgaatatgcggtacacagccacagaagacaccatggaaggaagtgatttcgacacaaggcgaaattcatgcatcagccaattagatttggcaaaaccattgcccttggcctcccagaaagccaaaacgttcctttttgccacaacctgatcgttagagagctcaacatcttgagcttcctctattgttctccattgaccgttcccggcttctctcttgttaaggttatcgaacctttgtaggagatgtggtgaagaggattttggacacaagaatttcgtcacagtggttacgattaggtctttaggcataaaatcattgttatgtgtccaaagacaccttttttgttagttcagaaagacaaggaacatttcatttacttgtttatacataccatatgaatatgattcactacatctgaacagaaaggctgttgcttctaacattttattt

SEQ ID NO: 15734 - DNA, 557 bp, Glycine max
  Coding DNA Sequence Number=SeqID_5955
tttcgtcactttcacatcagatcggagccacacaccacagcgatcgatgccgtcgacgcagcccttaaccgtcgcagcgaggtccctacgaagccggatcctctccagatccggatccacatccgccggcgcgagccgatgggcaacgccgggccacgaggagcgtcccaagggcttcttcatgaaccgcactcctccgccgccggggcaatcgcggaaatgggaggattgggagcttccctgctacgtcacgagcttcctcacgatcgtcatcctcggcgtggggctcaacgcgaagcctgatctctcgatcgagacttgggctcatcagaaggccctggagcggctcgaggcggagaggctcgccggagattcttccgattgagaggatcagatgtttgatgctttggaactttgaagcagtgtcttttggttttgttgataatggtggaataaagtgttctttgacgaacttatgattacaagtttaaaactttgtcacttttgatttgctagttgttgatcaacatctgaaattcgattgcttttttcaaacg

SEQ ID NO: 15735 - DNA, 543 bp, Glycine max
  misc_feature (162)..(162): n is a, c, g, or t
  misc_feature (178)..(178): n is a, c, g, or t
  misc_feature (209)..(209): n is a, c, g, or t
  misc_feature (252)..(252): n is a, c, g, or t
  misc_feature (308)..(308): n is a, c, g, or t
  misc_feature (335)..(335): n is a, c, g, or t
  misc_feature (338)..(338): n is a, c, g, or t
  misc_feature (355)..(355): n is a, c, g, or t
  misc_feature (425)..(425): n is a, c, g, or t
  misc_feature (427)..(427): n is a, c, g, or t
  misc_feature (442)..(442): n is a, c, g, or t
  misc_feature (459)..(461): n is a, c, g, or t
  misc_feature (463)..(465): n is a, c, g, or t
  misc_feature (467)..(468): n is a, c, g, or t
  misc_feature (470)..(471): n is a, c, g, or t
  misc_feature (473)..(473): n is a, c, g, or t
  misc_feature (518)..(518): n is a, c, g, or t
  Coding DNA Sequence Number=SeqID_5956
gaatcaccagaacatcacgatcaacgaatgaagcagacatacagcgatgatatagatgtattgtagaatatatcatacacattcacaacgtatctctaccctattctccgtgctcactcgtgctacatttgatataaagcggagtagataaaatcatcacanaatggcagcgggatanatgtggcgaagtgtatggcagcgcgtggcanaaacgaacgctcaggtgctcaccactatacaccgcattatgtnaggacagcctcattgtgaatcgaccctagcgcccatagattactattattagtctnttgcgggattgccggtagtagactaantanctaccaacacctctctncaccgcttatcttgtgtcgtcgccatacgtggactaatatggtgagggcgcggctccgcgtcggtgatgngntgaggagtgatgtgnggaggagagggaatatnnntnnntnntnnanttgagtgtgagtagtcacaccagagatattatatcaaatacgctntctgattgactacacggcgcttggt

SEQ ID NO: 15736 - DNA, 480 bp, Glycine max
  Coding DNA Sequence Number=SeqID_5957
gaggatctagtagcctcggtctcgctcgaggtgccctgcatccatgttggtggccatggctggtgggtcggcgtctgcttcagcgtgcggcggctggcggtgctggccgtcctcctcgcccgtggaggcggcgagtgagtggcaggtggtggcggtggtgcggggcccttcgatggtggccgttttcgatctgatggcctcttcctcgacatccgcggcgttctcctgccagatctagcttatggtggtctccggctgccggtgttgttcgtgcttggaggttggagatggggatggacaccggagaaatccgaggctggctagtccgaccatgacggtgacgacgtccttggacactgttcccttcctgttggcgccgtcaaggttgttcctttcccctcctcttcaccctacttgtataccgggtgaaaacctagatcctggtggggctagggacttttctgaggtatatttgaccca

SEQ ID NO: 15737 - DNA, 416 bp, Glycine max
  Coding DNA Sequence Number=SeqID_5958
aacatgggccacacctgtttcctgggggaaaattgttttgcttccccccttccccccccctaaacaacccgaaaaccgtaaggggaaatgggtgggggggcctaagggggcttacccccccttaatttggggtggggcccctgggccccttttgggaaggtgttgcccaccaaaccctaattggacaccttggctgggagaatgccaccaaaaaacctggggcccaattgaaccggcgtaaacgggtttaaccccaaagtggccgctcaaaagggggtttccggaaaaagaaacggggcccacaccgcgcgggggtccctccggggggcgccccccaaattctaatgtggccctcaccacccgcaaaaattttccccccactcaacccccccattgtggtcgaacgccccttaagc

SEQ ID NO: 15738 - DNA, 398 bp, Glycine max
  Coding DNA Sequence Number=SeqID_5959
acaaccaagaacagcaggaactcgacctcggaccacccactcgcccgccgccccacccaagaacagcaacacctcggcatcggatcgccggcgaatccgccgcccggcagaaggcatccgaatctcccatgattggtaagtacatcgtggtcgtccgcggcagctcctctgtgacctcgtccgactgcgagtgcatgatttcgaaggagaagaggttccggggcagcatcccagggactgggcccgaggtcgagtggttgccggtcaccgagcagagcttcaacgcctagcacctcatcgccggcgccccgatccccttaggctccagctcccgccggaacttcaccgtcaaggccctcaaccctggtggccctacctcttgatgtttgcggtcggtt

SEQ ID NO: 15739 - DNA, 538 bp, Glycine max
  misc_feature (152)..(152): n is a, c, g, or t
  misc_feature (170)..(170): n is a, c, g, or t
  misc_feature (244)..(244): n is a, c, g, or t
  misc_feature (387)..(387): n is a, c, g, or t
  misc_feature (452)..(452): n is a, c, g, or t
  Coding DNA Sequence Number=SeqID_5960
cacctccacttcagtagcagatggttggttcgtgatgtaggcgtttcctgtgtcggcagagagcggctggtgctcgaccgctgtagtcgcgccggtgtcggtgtgtgaacgccgcctgattgcggggagtcctgtttgggtgccgtcgtagncgctttgcgttgcgcgtntgtgtggagggggcgcggagtacgtgtgtgtaacgtctcgtggccggcggcgggtgctgacctcgtatcactcnatgatattctctattcgcacatgcatatgatcaatttccggcgcgacgggacatagtgtgacgcggcgcgcgtcttgagtactacgtctctctgtgttgtggacgtgaggcgcgcgcgcgcgctcactgtgtgcgtgcgtttncgtgcgctgcgctatacggcgcgtcactctgtgactgtatcggtgatagatctgtgggcgtgggngcgcgcgtgtggaggtgcgtgatttggtggatgtgatacttctcgatgctgtcgtgtacacgtgaccgcggaccacacgatgtgat

SEQ ID NO: 15740 - DNA, 269 bp, Glycine max
  Coding DNA Sequence Number=SeqID_5961
ccgccgacatacgtgccgagggaggcgaggcccgcatgagcgacccgcaactcatcaaggacatcaagcgggccggcaccatccccgtgatggacaaggcccgcagcggccacttccgcgaggaccagaaccgcgaaggcaccggcatcggataaggcgacgagagggaggtcgtaaccctcgcggacgaaggcggccacataaagaaacaccagctggcggaataccccttggcggggggaaggcgcaacctccggaaggacccacgg

SEQ ID NO: 15741 - DNA, 461 bp, Glycine max
  Coding DNA Sequence Number=SeqID_5962
caggaaactcgaaattgcagcggctgcagcgaccaatgtttctgcgcggggatcgcccgcgtgtggaattctgcagattcttgaacctcgttggggcccggtgatggggttcttcgatttcggtgtggtctgattatggggtggactattctgctcaaggggtgtaggagattggtgaaattggagcttgtggggtgcgaagggagtttcgacggggtgaaggcgattgggcagtgctgtgtgatgttggaggagttggtgattgtggaccacaggatggatgatgggtggctggccggggtttcgttttgcgagaatttgaagactctgagggttcagtcgtgtaaggtgatcgatgggagccccgggttggaggagcatttgggttgctgcgaggcgcttgagagggtgcatttgcagaaattccagatgagggatcggaacggcgtgggagcgctgtt

SEQ ID NO: 15742 - DNA, 572 bp, Glycine max
  Coding DNA Sequence Number=SeqID_5963
tacgagtcatggaaaggtctctcatggggaatggtgcctttgcttggtggagctctttgcgcatgcacatggcatttcttttacaatgctgaatctcttgaggtgttggtagcgcttcagggagcactaactgtgattggtaatattactctgtgcattgctgcctttcgaatcaacaagtctgcatccaaaatggaaacctctgaagagccgtgagggctaaatacacatctatgtgtttaaaataaaggtcaaaggaatgatttgttttcagtaatttctacaggcaggaatctgaggtgtagcctttttggagagtggtgatggttagagaagcaactggatctttggatgtggtattagcggaaagatctttttgctttatatctctagtgattgcactaaacatgtttcttgagcgtgtgtgtgtatatacttttatattgtagtgtattgtattgtattatcctgattatattcctggtgagtgaggccagtgcttcatgttcataacctattatgtaaacattcttcttctgcaatcgttgtagtcctgacttcattattttcgg

SEQ ID NO: 15743 - DNA, 510 bp, Glycine max
  misc_feature (102)..(102): n is a, c, g, or t
  misc_feature (485)..(485): n is a, c, g, or t
  Coding DNA Sequence Number=SeqID_5964
gtgaactcgcgaccatacgatatgtggctgttagtcaacatgacgagattaacatatgttgattatatactctccccgcgcccacactcaactgcacatctntgtgcttacctgcgttgtctcggcgtgtccactattacacctgctcacatcttgtattagtcactgctcctcatcaccacctcctctatcattgctgttactctgacaatgtcacatatgcactgctaccatgaatcttgagactatgcagacgtctacacgtgatactctcactgtctgtgtgcgagtgctacgtgatgtattcattctactgtctgtgctgtactctcgctatgatcctatacatatcttcactgtaggcgacgtgtacgcatgacgttgaccggcatgtatcatatagcgcgatggacgcgtacagcgccccgcggcgcgggctcacatcaattacttcgtggcacactctatactcaactctcacagcngactctactgtcacgctacatcaat

SEQ ID NO: 15744 - DNA, 484 bp, Glycine max
  misc_feature (28)..(28): n is a, c, g, or t
  misc_feature (33)..(33): n is a, c, g, or t
  misc_feature (35)..(35): n is a, c, g, or t
  Coding DNA Sequence Number=SeqID_5965
gataacgcttgcagtggccgacctccgntgcgntntggtaagctgacgatcaagcgcacgcccccaagcggagttcttgtgaccacaggggcccggaaggacagcccatgaacctcaaagccgtcgtcttcgacgcctacgggacgctctacgacatccagtcggtcgcggagatcaccgaagatgcgtttccgggctatggcgagatcatcacgcaggtctggcggatcaagcaactcgaatacacctggttgcgctcgctgatgcggcgttaccaggattttgccgcggtcacccgcgactcgctgggctatacgctgcgcgtgctcgggctcgactatgagaaggacgcgtttgagcgcgtcatcgagaaatacctgcatctcgatctctatccggacgcgacggccgcgctttcggcgctcaagccgcgaaagctcgctatcctttccaatggcagcccggacatgctgaatgcgctggt

SEQ ID NO: 15745 - DNA, 241 bp, Glycine max
  misc_feature (95)..(95): n is a, c, g, or t
  Coding DNA Sequence Number=SeqID_5966
ccttcgtatttttatctccacactagatgtttctgctgcatttccaccagcacaccagcatcaacgtttcctcttgggcttcagattattttcantggaacacttattgacggcaaaggaccaagcattaggaaaaaagtaaaaaagggttggaaaagaaattgcccaaaaatgactggagactgggaaaagccaatttccctttcgtggtttccaaaatttggggatttgccatggttgg

SEQ ID NO: 15746 - DNA, 311 bp, Glycine max
  misc_feature (116)..(120): n is a, c, g, or t
  misc_feature (207)..(211): n is a, c, g, or t
  Coding DNA Sequence Number=SeqID_5967
gtcatcacaatgaactgtcaggctaatacttggtggttactattcagtgtaaggataggccaaagcttctcgatctcatacatagtttgtactttgacagacatgaagtatgtggnnnnncatgcaaacattgatgctgaggggccagaagcatatcaggaatactacatcaagcatatagatgggtcccctgtgaaatcagatgcnnnnngacaaagagtgatacaatgtcttgcagctacaattaagagaagagtttctgagctgagtgacttattaactttatcgggatttgcaattcttttgatata

SEQ ID NO: 15747 - DNA, 567 bp, Glycine max
  Coding DNA Sequence Number=SeqID_5968
gggcggctggaaggacatatatcatatcgcggatatcaggcggtagaataataacacgcattcgaggttaatcttcttggcggcgacacaaacggagaaatactatgttgtgggggcgcgtaaagaactacaaaaaaaaaaagggcggacaataaaacgggggagtgggacatacgggataaagctttattgcgcctccgatcccgattccaagcacccctcgcttgaaaaataataaaaaataaatggttggagggtaaacggcaagacgacataaatacacagcgggagcaaaagggcggggggaaaaaagggaaatattatggaaaattgggtactaaacacaccgccggcaatgtgtgtgtcgcaacaggttccttttcggtaaacgcggggtgctgcacaaatggaaacaaaaaggcgcggagaaaaaacaaaggattattgggggggcgcggggggcgacaatagaataaaatcttatttgtgattttgggggcccccccgatcccacacaattgagtaataaagaaaaagcgtggcgatcctacatacccaaccatggta

SEQ ID NO: 15748 - DNA, 484 bp, Glycine max
  misc_feature (392)..(392): n is a, c, g, or t
  misc_feature (403)..(403): n is a, c, g, or t
  Coding DNA Sequence Number=SeqID_5969
gttatcaatcagagagtcgcatgtataggattgtgtcaaagtggagctatatgtattgcgccgtgagacgtaggtgtgagacagtagcggaggcgccagcacacaagtataccattcgtcttattgtctcgttcaatcagtaattgagagtgacaagtggaggtaaatgatattgtgtgttatgttaggagatgtgggttgatgagctgttgtctgatgcgctaagtggtgagtgtataggtacttcaaagcatgagatgtgctctaactactggttatcctaataggacaatgtatgtatagaggcataactcttgtggctgcgggtgcgtggggccgtttgtattatacaaaactcacattatttggtgttttatttataatatgtgggngtgtttattangagagtggggggagggggggggaggacacaacaactatatagtgattacacatattgttttctttgtcagtattgtgtatt

SEQ ID NO: 15749 - DNA, 230 bp, Glycine max
  Coding DNA Sequence Number=SeqID_5970
ttatcctttttattcgtacgtgcacttttccttcgaaagaaatcgtcatgaatacaacaccacgtgccgcacgaagattgaacggaaaagacactgtgttactcaacctaaatcctaaccacacaggcacgaaggaaataagtttcgcccaccacgtatggtcagcttgcaagtcgaaagttaatgcatcattttcttactacagtattctcaggttctgccatcgacat

SEQ ID NO: 15750 - DNA, 574 bp, Glycine max
  misc_feature (316)..(316): n is a, c, g, or t
  misc_feature (504)..(504): n is a, c, g, or t
  Coding DNA Sequence Number=SeqID_5971
atcaccctggcacctgtcaagtcgacgcacacgctacgtatgcacgaacggagcaccgcgaagatacgacccgagtggacagaggagaaacagctgcgcgaggagcccgccgcagggcgccgtcgcggcgcgccatcaggggcgaagagagagaatgtgtgggggcgtggtgcacaatcacatgtaatctcattccggctcaacacattgtactagatatagcgatctgaccagcgcacacacaccatcgggcccaccaacgccacgcgaggcgcgcgtcgtcatcgagcgcgcgtgtctccccacacaatcaacnagacaactctaacatggcagatctacgagagagggatccgtagcaaggcgcgcgcccgagatggctatagcagcatatacccgtaatagagttattgaatgtggagcgtgtagaagatacggttgccgatgagagagaggcagaccaggagagcgggagctgcgccataaacgcggacgccatcactnatcacggataataaaaggggggtcgctgctaactgtcgattggtggggttagaacaatatcgcggcgtgt

SEQ ID NO: 15751 - DNA, 541 bp, Glycine max
  misc_feature (32)..(32): n is a, c, g, or t
  misc_feature (82)..(82): n is a, c, g, or t
  misc_feature (306)..(306): n is a, c, g, or t
  misc_feature (333)..(333): n is a, c, g, or t
  misc_feature (340)..(340): n is a, c, g, or t
  misc_feature (513)..(513): n is a, c, g, or t
  Coding DNA Sequence Number=SeqID_5972
caacgactcgctgtagtagggtggtgtaaagnccgcgcccgctccatgcaccgataccaatcatgtgcgctctcaagcgccnctcccaccagagtttggagtagatgtggccgcacatctccacgggcgtgttaagagtgtgctgtcaatttctgtgtcgatgtaatgtggttcgctctcacactgctgcgcgccgcttaattgggtggtatgagtatcatgaacgtgttcagagtccggtgttggacgtgggtgcgagaggagagatctgctcactggcccaagcggaccattacaggataccgngtatctgggctcgcggccatctgcggngcatccncgccccgctttcctactactgcatcacggatgacgtggctagtatgtacatgctacactgcacgacttacctgcacccggcgcgacctcggtggacggggggagaaggacgactgccatctcccatgttcccgacctacagattctacagaatatgtaccatagatcactgcngctagtcgactctgctcacaatatctac

SEQ ID NO: 15752 - DNA, 278 bp, Glycine max
  misc_feature (121)..(121): n is a, c, g, or t
  misc_feature (182)..(182): n is a, c, g, or t
  Coding DNA Sequence Number=SeqID_5973
taatttcgtacgcttccctcttttggcatttaaaattttcattacttcgtctctctaggaatggccggccgtggaaaaactatcggatctggagtcgccaagaaggcgacgtcgaggagcngcaaagccggtctccagttccccgttggtcgtatcgcaagatttctcaagaacggcaaatncgccgagcgtgttggtgccggagctccggtttacttagccgccgttctcgaatacctcgccgcagaggttcttgaactggctggaaacgcagcgag

SEQ ID NO: 15753 - DNA, 518 bp, Glycine max
  Coding DNA Sequence Number=SeqID_5974
gtacacatacttccgttggagtggtgtcgtagttgttctttagaggagtgcgtgatgggtgaggggagagcatatcaagatcaacacgcgtattatattaatacctacggtctctgctatgtatgagggggcagagtcagaatcacagcgacgataagagaacgatgaaggacggtcgagattgagagtcgggcgttatcgagaaagactgcactgggcgcagactccgcgacgcagcgaaactggtaaccactcgaactacacacaagagtcaatgccaaccgggcggtggatgagccgagtccaccgaaactacagagaactgaggagagaatagggggagggagcacagcgcagcgtaagataactatcgtttaatgtaagtatagaacttgctacagaggacaattacatacaaacccatccctataaaagagaatacaacatatcatcccacatccacacgccgcggccacacgaggggggagccctccgcagcccgccatagaggcaagagt

SEQ ID NO: 15754 - DNA, 438 bp, Glycine max
  Coding DNA Sequence Number=SeqID_5975
gtttgtggatgcacatatgccgttcagagggagctctctctctttcccatctccaattcctccttgtgcaacaccccccaactgccacaaatctcacaaaaatgagtctccgtcatgcagttcttcgatttgattttgttattgttttttgtatccaattcggttcaatgtttatgtgcgttcacatttgatttttttggcaggagagaaccgcagaaaggaatggctccgcccttgggttcacaatctctccagtgggtctccgtcgagcaatatgcagctttatatagtacattccttcccagcttccctcgacaagcaggccggggcggcacgccacggataggctgacggcggcatctcgcaagtcagggccgacctcacaccccgcgtcccctggctgccttgcctgctgtccatctaccacagcggtggagt

SEQ ID NO: 15755 - DNA, 543 bp, Glycine max
  Coding DNA Sequence Number=SeqID_5976
gatattgactgaataacatccttagattattttaatattcgtaatatattaattaatccttctatagatggtcttttttctggtataagtctaggtattaaaagtggaataatggtttttgtatttatatgagttagagcttcattccctagaatacgttttgatcaattaatgtctttctgttgaactgtattattacctatactatttggatttatattcttagtaccatgtatattatacgcatttggagtattcttcataaatattagtttattttaattaaattcttattatagaatataatagacttaattattaaaaatttttatttatattaaacaaatattaaattttttaccagttacggttaaacgtattcattaaattttataaacagaataaatatgcctcaattagttccattttattatatgaatgaaattgtttttgctttttcattaatagtatttatactatatatattatctaaatatatcttacctagaatagttcgtttattcgtatctcgtatgtttatag

SEQ ID NO: 15756 - DNA, 574 bp, Glycine max
  misc_feature (27)..(27): n is a, c, g, or t
  misc_feature (269)..(269): n is a, c, g, or t
  misc_feature (338)..(338): n is a, c, g, or t
  misc_feature (486)..(486): n is a, c, g, or t
  Coding DNA Sequence Number=SeqID_5977
ggagcagcacgaaccacacgagacacngttctaagatatataggtcgtgctgccgacgtgtgtcactatcacacccagtattgcatttcgcgcgcgctttaattatcatacctgtcgtatgacaacgggcgagggtccatccttctcgcgtcgtatacgtacttcagctactaggtcaattgagatagaatgtaaagcggtcagtcaaagagtataatctacatcggtctacgctcgagaattggtgaatcttcacaaagacgaagagnatagacgatcgtcaccgtatgttcgtgataaggtcactgcatacgacgcgcgcttattaatcgatttcngatcatatgctatacgatacatattctaaagggcgcagtatgacatagatacgagatgaggtaggaattaacacaaatctctctacgctttgcttgaggctgggaaatgggatgagtgtacaggacagggacaacggcagaatatagntaaaataggccaccctccgccccgccacgccgcgccaggatatctgtgcgacgcgcggaagcatacacgtctacattgctcagtgcgt

SEQ ID NO: 15757 - DNA, 433 bp, Glycine max
  misc_feature (68)..(68): n is a, c, g, or t
  misc_feature (96)..(96): n is a, c, g, or t
  misc_feature (353)..(354): n is a, c, g, or t
  misc_feature (365)..(365): n is a, c, g, or t
  Coding DNA Sequence Number=SeqID_5978
gggaatctacaaacgctagcttaaaaggggggttgtgaaaatttttttttcgggcccgcccgcggggncccattgttgtccccccctttgggaggnaaagccctttgacccaataattccgggggccccaatctggggacctccatttttttttttggggtttcaaaaactcgggtaggaaggccgaaaggaaagggccaggaagaatttcgccggcccccagggcctggtaaagtttttggcgaccggaaacccttgggtccgttgaacattagttttttcgagattcctgggaaagaaatatccggggatttgttatgggaattgaaaggggctacaagctgctcccaccnntgtgtaaaagnctaccctttgttgtctccttttctcttcccatctctctctttctcaacgcaaaccctacttagcctcc

SEQ ID NO: 15758 - DNA, 556 bp, Glycine max
  Coding DNA Sequence Number=SeqID_5979
gactctgacactgagcaaaccggtactagacgtgctcttgctgatctaactgaccagtccgatgacaacaccgagaccaataccgagaccaacaccaatggtaacaccagtgatcaagatgactccgacactgagcaaaccggtactggacgtgctcttgctgatctaactgaccagtcagatgacaatactgagaccaacactaacgacaacaccaatgatcaagatgactccgacactgagcaaaccggtaccctacgtgctcttgctgacctaactgaccagtccgacgataacmccgagaccaacactaatgacaacaccaatgatcaagatcaatctgactcagataactaagctgagaaagatatactgctactgacacaattatataagcccaagggctttaactaaattcaaaaaaaaagtattaataatcatattcatttacttgcaaggtytaagtttattttaggtaaaactatgtttaatatttgttttaagtcagtagtaagtattacatattatattatctgtttattgtctttatacttga

SEQ ID NO: 15759 - DNA, 487 bp, Glycine max
  misc_feature (37)..(37): n is a, c, g, or t
  misc_feature (90)..(90): n is a, c, g, or t
  misc_feature (129)..(129): n is a, c, g, or t
  misc_feature (135)..(135): n is a, c, g, or t
  misc_feature (179)..(179): n is a, c, g, or t
  misc_feature (304)..(304): n is a, c, g, or t
  misc_feature (315)..(315): n is a, c, g, or t
  misc_feature (334)..(334): n is a, c, g, or t
  misc_feature (443)..(443): n is a, c, g, or t
  Coding DNA Sequence Number=SeqID_5980
tacctatacctctgcatgtctgatatatcgagcactnatctactatcgatctctcactcatcgacggtgaatcatacgactgcatcgctntgatggtcgatctacatgatctgatatatcatctctatnctgtcncagcgtagctctccactactcgtgcggcaggacgctgacgtcgngagatcagtgtgctatagtcgatgtgaaccgctgccatacgcgacgcgcgcaagcacatatagtgtcgcgactctaactggttccctcagctcggcctacgttgtcatgacattcgctgcagctngacactcgtcngctcatcactgactcatanctactcgccctagttgctcgccatgactcatcatcatgtgtgcacatagagtgtgtagtcagagtatggactatgatgcagatcgcactagatgacagctgcactggtncgtctctcttacatccggagaactcgagtaaccgacagtcgttg

SEQ ID NO: 15760 - DNA, 443 bp, Glycine max
  Coding DNA Sequence Number=SeqID_5981
gaaaataaacacatggccggaaaattaatgacattacaggtttctcatctgctatgcatatctttagtcatcttctttgtattctctgtgaatgttgtcagtgaggaggattaccagagagtggtgcctccggaagataaaacgactacggtttggttctctacgatcaaacaatctggtaatgattactgggcgaaactcaaagagagtttaggtcgtggtcacgcccgcttttttcctccgaacatagattttagaggaaaggatgatgcatcaatgggagcaggaggaaagatgaaagaggcggtcacaaggagcttcgagcacagtaaagatacggtggaggaagctgccaggtcagcagcggaggtggcgtgtgatgcgacggaagcagttaaagaaaaggtgaagaggagcttttccggcagcgagacgactcagca

SEQ ID NO: 15761 - DNA, 367 bp, Glycine max
  Coding DNA Sequence Number=SeqID_5982
gagctgaaaacggtgctccctcaacctagccggagccgacgatcacttcggtgaccactagcctggagggtgagccgatcaacccgaggagccgactgatgatgatgttgataggggatgaagatgagcttttggtgaactccttgcaggaaggcttgaggcagagcttgacgaggtggacgctgcgcttggcgaacttgggtgaagctcctaccgcggccggcttgtggcaccgcttgacgagccgggatgctgtcgttggccgaactcccggagcgggtcgaactaccgagtgtaactgcgtccgatggcggcgcggggagggagagatctcgaggggtgctattcgcttgcttggactggagac

SEQ ID NO: 15762 - DNA, 263 bp, Glycine max
  misc_feature (114)..(114): n is a, c, g, or t
  Coding DNA Sequence Number=SeqID_5983
caacctcagggcctgagcggttaacctggcgtggaagatacggccctggttttcattccaggtttagacaagtgtaggcgatcgaccagagatccactcagcataaacaaacancgtacggagctgttgtcgacgatccattcctgattctgcaactttgtctttgattcgccattgatgacaacccaaaaaaaattattcgaagaaaaataaaaaacgattgtaagagaaacaatgtgcgtgcggcggtgttttaaagcaaa

SEQ ID NO: 15763 - DNA, 495 bp, Glycine max
  misc_feature (137)..(137): n is a, c, g, or t
  misc_feature (144)..(144): n is a, c, g, or t
  misc_feature (164)..(164): n is a, c, g, or t
  misc_feature (447)..(447): n is a, c, g, or t
  Coding DNA Sequence Number=SeqID_5984
aggtgcgtcgagtatgtgatagaaataacaagatacacatgagaacacgaatataggatgttaactatatataatgtaaatactctacctttgtgttctataagacgtctgacctgcgtatattagttcatacatcnttgtttnatcttctcgtttttgtcatntgccatagggtgatcgcgtagatgtgttgtaaaatataggccgtttggttatgtgtgagagtacgtcatccggaccagtgccgagatgatattgtgatatgtggcaccacgcttccctcccgctcatctttctgatgactgtcatacacgaaagtcgtgcttgtataatcgagctaataagatagatagtcatttagtaaagacgaaaaagaccgcacaacgctgaatacaccaacaatcacatacatcatacgtcgacgacagatgttacaatgactcacanatccacacacgctccgtagctcgctgcggtgccgttgatgcttatata

SEQ ID NO: 15764 - DNA, 523 bp, Glycine max
  misc_feature (48)..(48): n is a, c, g, or t
  misc_feature (130)..(130): n is a, c, g, or t
  misc_feature (236)..(236): n is a, c, g, or t
  misc_feature (257)..(257): n is a, c, g, or t
  misc_feature (312)..(312): n is a, c, g, or t
  misc_feature (331)..(331): n is a, c, g, or t
  misc_feature (382)..(382): n is a, c, g, or t
  misc_feature (479)..(479): n is a, c, g, or t
  Coding DNA Sequence Number=SeqID_5985
gttcttgcgctagctttctgtatgctgtggactatgccgtgtggcccngtgtctgctctgccgttatgtgtgctgtttgctcgtttgtctgtttgtctcctcgttccactctcagctatgtctattgttntggtgtgttgggatgcgctcggcgctggcgcagcctctctctcgtgaggcggtcgcgtgcgggtgttgtcgtgtccgcttccgtgctcgcttgcgtcgcgcttcgntctgcgtcctgcactcgtctngtgtgtggtgtggtgctgtcgccggcgctcgcccgcgttgcgtggctgcgatcantgtgtctatgattattggngtgcggtgtgcgtgactctgtgccctcgcggttgatcggatgctgtgttcnctcttgtacggcgtgctgtgctgtcgcgtcgtgtctgcttacggtggtgcgctgccgcctcttatcttacgagtgcgactgggtggattggtcgtcngctcgatgcgttcttgaggtatcttgtgcgtgtgttgcggcgac

SEQ ID NO: 15765 - DNA, 398 bp, Glycine max
  Coding DNA Sequence Number=SeqID_5986
tagatgtgtagctccatgctcttgtagccgagccgtagccagtagcagctcaaccatgtccgcatcatcttcctccgtaggtcaggatgagatcttacccctggttccttgcatagagtgcagcggccgggtgtactcttggattgctcgtcatggagtgaacgcgggtcgtcgcttctacaagtgtgtcaacaaggaaaggtgtggattcatgagatcttccgaagagtatcgtgcgcagctgataggtagccagctgctggcagatcggctagttgtccctgcgcattcacagccggcagcttacttgcaccgtcgagttattcctggcgaacaagtcgagcaatggaggcgcggaggggaggtggcggcagatgcacgagtggagcagcagccat

SEQ ID NO: 15766 - DNA, 563 bp, Glycine max
  Coding DNA Sequence Number=SeqID_5987
ggcactacaattagcaccacaaagtattgcgttaaaattattacgtgcagaagcattattaggattaggcaagtacactgatgctgccaaggaagcaggtttgatcctacgtgatgatgatccaaacagtagtgaagcatatttcattcgtggaagagctttatactacaatggatcagtagataatggtttaagtcacgtgaatcgtgcattaagtttggatcctgataatcaacgttgtttcacgtttagaaaacaattaaaacaaattgaacagatgaaagaggaaggaaaccaagcgtttaaaaatggaaatttcacagaagcaattgaaaaatattcacgtgcagtagcagttgatcccaacaacaaagtattgaattcaacaattaattgtaatatggcagcagcgtatgcaaaacaaaacaaacatcaagaagcagtaaaatacgcatcattagcagttgatcaaaatccagaatatgtgaaagcatatttaagacgtggtgattcttacacaatacttgaaaaacacgaagatgccatgcgtgattatcaaaaag

SEQ ID NO: 15767 - DNA, 530 bp, Glycine max
  Coding DNA Sequence Number=SeqID_5988
tacgtagcaccactcactgctagaacacacattacgctagaataagccgcccactcatccctccttacgcccatcacccacaccgctccacacacgtcttccctacccatatcccctttcataagcagacgtcacatatatttatgtcattttaaatgatgcatgtatcatattttttcgctgtttcgttataaaaggtactgattaagagttcaacgcacaactgatcacggtctcagcgcgacagaccacacaaatcgaagcccaccaacccgagcacgcgccgataagatggtagtatatccgtcacaaatactacgcgatctcctcccactccgaaacttccttactacgcgctctcacgccgttgttcctcgttccgcgtcctctctctctcttcttctctattccgacttatctattacctccgtgtataaaaacgcttccagtaataacgtcttagacacacaacaccacaccccaccctctctctgcgccgccctctgagtactgccgcattggaacgcgaa

SEQ ID NO: 15768 - DNA, 313 bp, Glycine max
  misc_feature (118)..(118): n is a, c, g, or t
  Coding DNA Sequence Number=SeqID_5989
taccacctacatccgtattactcgctacccccctaattatcaaccacacaatatctaccaatctcaatgtccacgcacatcctcacccaacaacagatcacctccaccctcctacatnactcctcactcatccattctcgcctaccccaccccccctcaccaccatctctccacaccacccaccacctacacccacctctcccatatcatctccaacttttattacaaatacaccaatatactcactctcacactcacacccaccactacaactacccaaaccatcacatctaactcatactactcctacaca

SEQ ID NO: 15769 - DNA, 591 bp, Glycine max
  Coding DNA Sequence Number=SeqID_5990
agagctgttgggttttgttcatgagtgatgacggctagggtttccgctggtcagatctttgtttccgggagtgagagcaggcgtatctcactaatctacgacatctaactcagatttcagtcgggtctttatcattttgctatatccgggtcagttccttggaggtgttgatgagttaggccactgcatgcatctctctatttagatctaccagttggtgtggttttagccattggtttaaggctctggtagggagtagagagaatgggtcgcggtcttatcaactttgatcatcattcctcagtggcagcgtgtttcagctctcgtgtcattggagtttttgcggtaggttgttattcacctatttgggctttatgagatgctggatggaagcatatcctctttttgaattctcattggtgtggtgagcgtagtcatcatcctctgaaaaaataaaagctttagtaactagccaagacagaggagatttctaggtagtaggtttggtcggtggggaaaaaattgaacaattgtcttgatctgaatcctgtggtggatttcctcgggggattatgctcagaccggtctgac

SEQ ID NO: 15770 - DNA, 550 bp, Glycine max
  misc_feature (326)..(326): n is a, c, g, or t
  misc_feature (479)..(479): n is a, c, g, or t
  misc_feature (495)..(495): n is a, c, g, or t
  misc_feature (518)..(519): n is a, c, g, or t
  misc_feature (521)..(522): n is a, c, g, or t
  Coding DNA Sequence Number=SeqID_5991
atataaagtgtgtgagagtagtgtgggagggatagagtgagaggaggttgagtgagtaagagatagagtgtagggaggagagagtagagagatgaagagggagagggtaggagatgagggggtgagaatataaaatattaagtttgataagatggagaagagaaagacgagagaagaggattagtgatatagatagagtattgttaatatatatgaaggggtgagtgaagaggtatgagagcaaaggagatagaataaaaatcttgagtaatattattaatgtgagggatagtgatgggtagtgtgttgaagaattaggtaagtangaggaatacgtgagtgaagagtggaggagagaggtggggtgggtgggagaggataaagagaggaagaagagttgtagagagagatatgttggaatgaaatacaaagagagaagtagaagagaggggggggtggggggtggggttggtgtggtntcggtgtgggggggtnttgtcgaaatatatcacttctcnncnnggggggagccgggtgttgggatggagga

SEQ ID NO: 15771 - DNA, 400 bp, Glycine max
  misc_feature (180)..(180): n is a, c, g, or t
  misc_feature (206)..(206): n is a, c, g, or t
  misc_feature (209)..(209): n is a, c, g, or t
  misc_feature (217)..(217): n is a, c, g, or t
  misc_feature (229)..(230): n is a, c, g, or t
  misc_feature (258)..(258): n is a, c, g, or t
  misc_feature (260)..(260): n is a, c, g, or t
  misc_feature (275)..(275): n is a, c, g, or t
  misc_feature (303)..(303): n is a, c, g, or t
  misc_feature (331)..(331): n is a, c, g, or t
  misc_feature (339)..(339): n is a, c, g, or t
  Coding DNA Sequence Number=SeqID_5992
gcgtccgcacgcaccacaagtcgcgtccataagcgcgggcggggggggggctcgccgtcttcgaagaccgccgccgccagctccacaccacgcgctccccgcagttcctcgggctccgcaaccagcgcgggctgtgggccgaatccgactacgggtccgacgtcatcattggagtcttcnacaccggcgtggtacgctagacgccncancttctccnatttgaacctcnnccccattcccgggcggggggaaggcgcntncggggggggggtcanattctcccccaaaaactgcaaccacaanctcatcggggccagattcttctccaaangccacaangcaagtgcggggggggggggctctcaatccaatcaaccacaccatgaaattacaatcccct

SEQ ID NO: 15772 - DNA, 511 bp, Glycine max
  Coding DNA Sequence Number=SeqID_5993
gtgttaatggttaattagccacccataccagacattggcagtggtatccacccggtagagattttgggaaggtggtgttattaacaccccaaataaaccatgggatgaccatgggattttttgggtaggaccataaattggggcagccattgcagccttctacccccagttaattttaaaagcaggggcagccaaggcccttggatcattcaggagtaccccccataattgaaaggtttttcttttcataaagatggctctagggaaaaaaaaataattggaaaaatggaggttgaaatggcaagtttaaaaatgggaaaagcttttggctttgaatttgcaacgtttttttgaccctctcaattaggttttcaaagattggggaaaaggggagattaaaagtttctttcatgaaagggggacccttttgcactttcctctggggggtttttcccttaagggggtcatttttttttttaaagtaatttttttctgtcatctctgaactcaa

SEQ ID NO: 15773 - DNA, 529 bp, Glycine max
  Coding DNA Sequence Number=SeqID_5994
cacgatattttttatccgcggtggggagctatatatcctaatccgtcccaattaataacagcgcggccggcccacacacatgtttcgtttcgcggcctacatcgattgtaatgcgagttcgatatatctaatattacgcgcgcgccgccttctgcgtactgacaatatacccgcaccgcattctgtaaccctcattcgggtttgtttgtggctcgcgggggggggggggggggcgcgcgtgtttattacgggcgggatcgcactacaattcacttcgggcgtggcgattttaaaatgacgcggggcgttatgtttcttttatataatcgggggattttagagcgtctcgtcggtctaatttaacaatacaacgcggacacaaacaatggccggccgaatcatgtgtgtagagtggtgggggtgtgaagaattcctcgctattcaacggggcccgcggttaacggttggtttaaatcacaattgtacggcgagaagaaagagagagaaatttctctaatcatcagcgcga

SEQ ID NO: 15774 - DNA, 593 bp, Glycine max
  misc_feature (47)..(47): n is a, c, g, or t
  misc_feature (49)..(49): n is a, c, g, or t
  misc_feature (51)..(51): n is a, c, g, or t
  misc_feature (68)..(68): n is a, c, g, or t
  misc_feature (178)..(178): n is a, c, g, or t
  misc_feature (206)..(206): n is a, c, g, or t
  misc_feature (212)..(212): n is a, c, g, or t
  misc_feature (215)..(215): n is a, c, g, or t
  misc_feature (248)..(248): n is a, c, g, or t
  misc_feature (250)..(250): n is a, c, g, or t
  misc_feature (329)..(329): n is a, c, g, or t
  misc_feature (405)..(405): n is a, c, g, or t
  misc_feature (433)..(433): n is a, c, g, or t
  misc_feature (466)..(466): n is a, c, g, or t
  misc_feature (468)..(468): n is a, c, g, or t
  misc_feature (473)..(473): n is a, c, g, or t
  misc_feature (489)..(489): n is a, c, g, or t
  misc_feature (522)..(522): n is a, c, g, or t
  misc_feature (540)..(540): n is a, c, g, or t
  misc_feature (546)..(546): n is a, c, g, or t
  misc_feature (556)..(556): n is a, c, g, or t
  Coding DNA Sequence Number=SeqID_5995
gcgtcgctacagtcattcacagtgtcgtagacgagcaagactacaancnanaggtagagtgtgttggnttgtgctcatgatacataaagagtagttaacgatttcataacgttaatgctggtgataatgatctgacgtgagatagtccagcaagcagtattatagatgctatgagatngtcgacgtcgcagacgcgtgctagttcngggagnatngagtgtgctcgtcggtattgttgtatatagtcntntatcgtggatggatatgtagtgaagtagtgggtagtagtagatagaagtatatgatatagtgtatattttgtagtagtntattagttgatgatgatgagtgaggtagagagagtagatagatagtacatcataggtctatatctcctgtcgctcnagcagtctctctgtgtgttggtctgatnacacagcacgagccgatgcgcgcgctcactctncnacctntctctctatatacacnccacgtgtgtatgctcccacgctcacgtacttngtttcgcgctcgtctgcntctccntctgcttatntatacactagacagtagtaccaagacgaataccacta

SEQ ID NO: 15775 - DNA, 482 bp, Glycine max
  Coding DNA Sequence Number=SeqID_5996
gtctgtgtaatggactacgttgcgacatttgagagccgataggataatattatcagcaggcagaggtgagagagaaagaaacgaaacagataaggagcgggcagtaggtgataagaaaaattaacggcgagcaacggcaaaaatcacaccacacgaacacgtgcagacccattactacacgcaagcacggcaataacaggagtaagtaagtccgtgtttgtaaagtgtcggctgagctcgggtaaattatgctacgcagcaaccacgatcccatcataatgagcgtagtgaatacggagtagcagtaatatagaggtttagtgtaggttgagatggtaaacagagagaattccgcttcatctttttagttctttggtctatccggtggatcggtcgactagcttatgtgtttgtagatggtaggacacaccgccaatttacattaccaatgcgctaatagttagaaaacgacacacccaatg

SEQ ID NO: 15776 - DNA, 78 bp, Glycine max
  Coding DNA Sequence Number=SeqID_5997
cttctgttcttatccacgtatggcctctaaacccctcttgatggtcctcaaggttttgctgaaggttcctcctacctc

SEQ ID NO: 15777 - DNA, 538 bp, Glycine max
  misc_feature (330)..(330): n is a, c, g, or t
  misc_feature (467)..(467): n is a, c, g, or t
  Coding DNA Sequence Number=SeqID_5998
aggttataagaagcgctaatgccagaataactccaattaccacccgatttcagattccaccccactgacgatgaacttgtgaatcactacttgtgtagaaagtgtgatgcacaaaccattgctgttcccatcatcaaagaaatcgatttgaacaagtttgatccatggaagcttccacagatggctctttacggcgagaaagagtgctactttttctctcctcgagacagaaataccccatacgctcgagaccgatcaggctgccggaatgagtactgctaggttaccggacgtgactatccgatgggatgaacgatatgccgtgtatcnagaattgcctcgtgatctacgcgtgcaaatcccaatggagtggagaccaatgggatcatgcacgactatcgcttagcgacgtcgacagatcctgcctcaaaaacagcaccaccaccacatcttgatgctggatgatngggcttttgcgcccaatttcccacagtaatgtatattgagaatttcaatgttgttcgcgtaggagatccaa

SEQ ID NO: 15778 - DNA, 536 bp, Glycine max
  misc_feature (138)..(138): n is a, c, g, or t
  misc_feature (155)..(155): n is a, c, g, or t
  misc_feature (247)..(247): n is a, c, g, or t
  misc_feature (353)..(353): n is a, c, g, or t
  misc_feature (426)..(427): n is a, c, g, or t
  misc_feature (429)..(429): n is a, c, g, or t
  misc_feature (476)..(476): n is a, c, g, or t
  misc_feature (483)..(483): n is a, c, g, or t
  misc_feature (504)..(504): n is a, c, g, or t
  Coding DNA Sequence Number=SeqID_5999
gtaagcaagcacacgtcgagctatgtgtgttcacatacgttattccgtgtgtgtcttgctgtatccgtcgttgcattagcgtgtacatgcgtcgccaacactcgcgctctgcgatcgtgcacaggtgagtggtatacnataatagtatgtgatgngtcttcgtatatatatatcactttgtggcgctcctcttgtcttgctgagtctttcatatgtgtcggtgtgcttacgtctatcctcatattantcatatcgctcgcgcgagtcatccagcatactattgctgctcgtactgtgtgtatggggtcgtgctccgccctcccgtactactggactaaggtagagaggtatgngcgcctcttccttgtgtccgcctgtcgtgttcagcagcacttagtccgctctatatgtggatattcaattgtnntnctcgcggcggtgtgtggagagcggttagctcgacagtcgaacacacnattcacnttacagcctgcgacttacacnaccacaccaccactatgtaagaggcgcggcac
